(19) United States
(12) Patent Application Publication
(10) Pub. No.: US 2023/0381130 A1
(43) Pub. Date: Nov. 30, 2023

(54) ANTIBODY SCAFFOLD STRUCTURE

(71) Applicant: Atreca, Inc., San Carlos, CA (US)

(72) Inventors: Jessica FINN, San Carlos, CA (US); Shaun M. LIPPOW, San Carlos, CA (US)

(21) Appl. No.: 18/300,198

(22) Filed: Apr. 13, 2023

Related U.S. Application Data
(63) Continuation-in-part of application No. PCT/US2021/054983, filed on Oct. 14, 2021.
(60) Provisional application No. 63/092,293, filed on Oct. 15, 2020.

(51) Int. Cl. A61K 31/216; A61P 33/14; A61K 9/00; A61K 31/42

(52) U.S. Cl. CPC A61K 31/216; A61P 33/14; A61K 9/0014; A61K 31/42

(57) ABSTRACT

Provided herein are antibodies comprising a scaffold region and methods of using such antibodies to generate antibodies with binding specificities that differ from a parent antibody that comprises the scaffold region.

### CROSS-REFERENCE TO RELATED APPLICATIONS

[0001] This application is a Continuation in Part of PCT/US2021/054983, filed Oct. 14, 2021, which claims benefit of U.S. Provisional Application No. 63/092,293, filed Oct. 15, 2020, which is herein incorporated by reference for all purposes.

### SEQUENCE LISTING

[0002] The instant application contains a Sequence Listing which has been submitted electronically in XML format and is hereby incorporated by reference in its entirety. Said XML copy, created on Jul. 27, 2023, is named 097519-1381708_2510US_SL.xml and is 2,343,004 bytes in size.

### BRIEF SUMMARY

[0003] Provided herein is an antibody scaffold that can be used for the identification of antibodies having new binding specificities compared to a parent antibody compared to the target of the parent antibody. Thus, in one aspect, the disclosure provides an antibody that binds an RNA-protein complex, wherein the antibody comprises a heavy chain variable region comprising a HCDR1, a HCDR2, and a HCDR3, and a light chain variable region comprising a LCDR1, a LCDR2, and a LCDR3,
[0004] wherein the antibody comprises a pocket that is 13-20 A deep,
[0005] and the HCDR3 comprises
[0006] i. at least 25 amino acids
[0007] ii. a first intra-HCDR3 disulfide bond, and
[0008] iii. optionally, a second intra-HCDR3 disulfide bond.

[0009] In some embodiments, the HCDR3 comprises the amino acid sequence of X¹CCX²CX³CX⁴, wherein X¹=4 amino acid residues, X²=4-7 amino acid residues, X³=6-8 amino acid residues, and X⁴=10-14 amino acid residues (SEQ ID NO: 1728); for example, in one embodiment, the HCDR3 comprises the amino acid sequence of (I/T)(S/T)X₃(F/Y)CCX₇(G/S)X₉X₁₀CX₁₂(N/S)X₁₄(D/E)TS(F/Y)CX₂(G/N)X₂₂X₂₃X₂₄,X₂₅ (F/Y)YX₂₈X₂₉(D/N)X₃₁, wherein X₃ is A, P, or S; X₇ is H, L, Q, or R; X₉ is A, G, K, or N; X₁₀ is A, N, Q, R, or S; X₁₂ is A, L, or P; X₁₄ is H, Q, R, or S; X₂₀ is A, G, or N; X₂₂ is Q, S, or Y; X₂₃ is D, F, N, or Y; X₂₄ is A, K, N, P, or Q; X₂₅ is D, Q, R, or S; X₂₈ is F, L, W, or Y; X₂₉ is F, M, or V; and X₃₁ is I, P, or V (SEQ ID NO: 1729). In another embodiment, the HCDR3 comprises the amino acid sequence of (I/T)(S/T)X₃(F/Y)X₅CX₇(G/S)X₉X₁₀CX₁₂X₁₃X₁₄(D/E)X₁₆SX₁₈X₁₉X₂₀X₂₁X₂₂X₂₃X₂₄X₂₅(F/Y)(F/Y)X₂₈X₂₉(D/N)X₃₁, wherein X₃ is A, P, S, or T; X₅ is A, C, or S; X₇ is H, L, Q, or R; X₉ is A, G, K, or N; X₁₀ is A, N, Q, R, or S; X₁₂ is A, L, or P; X₁₃ is A, N, or S; X₁₄ is H, Q, R, or S; X₁₆ is N, Q, or T; X₁₈ is F, M, or Y; X₁₉ is C, S, or V; X₂₀ is A, G, or N; X₂₁ is A, G, or N; X₂₂ is Q, S, or Y; X₂₃ is D, F, N, S, or Y; X₂₄ is A, K, N, P, Q, or S; X₂₅ is D, K, Q, R, or S; X₂₈ is F, L, W, or Y; X₂₉ is F, M, or V; and X₃₁ is I, P, or V. In some embodiment, the HCDR3 comprises the amino acid sequence of X¹CCX²CX³CX⁴, wherein X¹=4 amino acid residues, X²=4 amino acid residues, X³=7 amino acid residues, and X⁴=12 amino acid residues (SEQ ID NO: 1731). In some embodiments, the HCDR3 comprises the amino acid sequence of X¹CGGX²CX³ wherein X¹=4 amino acid residues, X²=7 amino acid residues, and X³=12 amino acid residues (SEQ ID NO: 1732). In some embodiments, the HCDR3 comprises the amino acid sequence of X¹SCX²CX³ wherein X¹=4 amino acid residues, X²=4 amino acid residues, and X³=19 amino acid residues. In a further embodiment, the HCDR3 comprises the amino acid sequence of TSSFCCRGGSCPSHDTSYCGGQYKSYYYMDV (SEQ ID NO: 21) comprises at least 1, 2, 3, 4, 5, 6, 7, 8, 9, or 10 amino acid substitutions at positions that maintain the first disulfide bond and, optionally the second disfulfide bond.

[0010] In some embodiments, the antibody comprises a pocket comprising amino acid residues 36, 37, 38, 39, 40, 52, 55, 58, 60, 61, 105, 106, 107, 108, 109, 111.5, 111.7, 111.8, 111.9, and 114 in the V_{H} per IMGT numbering and amino acid residues 37, 38, 40, 42, 55, 56, 107, and 116 in the V_{L} per IMGT numbering; and may further comprise one or more amino acid residues selected from the group consisting of 57, 111.6, 112.9, 112.7 and 116 in the V_{H} per IMGT numbering; and/or one or more amino acid residues selected from the group consisting of 39, 52, 57, 80, 105, and 106 in the V_{L} per IMGT numbering. In some embodiments, the pocket further comprises amino acid residues 57, 111.6, 112.9, 112.7 and 116 in the V_{H} per IMGT numbering; and/or amino acid residues 39, 52, 57, 80, 105, and 106 in the V_{L} per IMGT numbering. In some embodiments, the antibody comprises at least 1, 2, 3, 4, 5, 6, 7, 8, 9, 10, 11, 12, 13, 14, 15, 16, 17, 18, 19 or 20 of the following residues in the V_{H}: A, C, H, K, M, N or R at position 36; A or V at position 37, F, H, V, W, or Y at position 38; F, M or Y at position 39; S, T, or Y at position 40, W at position 52; F or R at position 55, A or S at position 58; D, H, Q, S, or T at position 60; D, E, N, or S at position 61; I, T, or V at position 105; F, S or T at position 106; A, P, S, or T at position 107; F or Y at position 108; A, C, or S at position 109; A, C, L or P at position 111.5; H, Q, R, or S at position 111.7; D or E at position 111.8; C, N, Q, or T at position 111.9; or C, F, L, W, or Y at position 114; and/or at least 1, 2, 3, 4, 5, 6, 7, or 8 of the following residues in the V_{L}: A, H, N, S, or T at position 37; A, D, F, S, T, or Y at position 38; A, D, E, L, S, T, or Y at position 40; Y at position 42; H or Y at position 55; A, H, K, M, N, or R at position 56; F, I or W at position 107; or H, K, Q, R, V, or W at position 116. In some embodiments, the antibody comprises at least 1, 2, 3, 4, or 5 of the following residues in the V_{H} per IMGT numbering: K or Q at position 57; A, C, D, N, or S at position 111.6; S at position 112.9; A, C, S, or V at position 112.7; or D or N at position 116; and/or at least 1, 2, 3, 4, 5, or 6 following residues in the V_{L} per IMGT numbering: T or V at position 39; L at position 52; D or N at position 57; K at position 80; A or S at position 105; or A, I, S, or T at position 106.

[0011] In some embodiments, the pocket comprises at least 1, 2, 3, 4, 5, 6, 7, 8, 9, 10, 11, 12, 13, 14, 15, 16, 17, 18, 19 or 20 of the following residues in the V_{H}: K at position 36; A at position 37; W at position 38; F or M at position 39; S or T at position 40; W at position 52; R at position 55; A or S at position 58; D, S, or T at position 60; D at position 61; I or T at position 105; S or T at position 106; S at position 107; F at position 108; C at position 109; P at position 111.5; H, R, or S at position 111.7; D at position 111.8; T at position 111.9; or Y at position 114; and/or at least 1, 2, 3, 4, 5, 6, 7, or 8 of the following residues in the V_{L}: H, N, or S at position 37; D, S or Y at position 38; E, L, or S at position 40; Y at position 42; H or Y at position 55; K or R at position 56; I or W at position 107; or K, R, or W at position 116. In some embodiments, the antibody further comprises at least 1, 2, 3, 4, or 5 of the following residues in the V_{H} per IMGT numbering: K at position 57; S at position 111.6; S at position 112.9; C at position 112.7; or D at position 116; and/or at least 1, 2, 3, 4, 5, or 6 following residues in the V_{L} per IMGT numbering: V at position 39; L at position 52; N at position 57; K at position 80; A or S at position 105; or A or T at position 106.

[0012] In a further aspect, provided herein is a method of generating an antibody that binds to an RNA-protein complex comprising mutating a scaffold antibody that binds to a first RNA-protein complex to generate an antibody that binds to a second RNA-protein complex and has an antigen binding specificity that differs from the antigen binding specificity of the scaffold antibody, wherein the scaffold antibody comprises a heavy chain variable region comprising a HCDR1, a HCDR2, and a HCDR3, and a light chain variable region comprising a LCDR1, a LCDR2, and a LCDR3, and comprises a pocket that is 13-20 A deep, and the HCDR3 comprises
[0013] i. at least 25 amino acids
[0014] ii. a first intra-HCDR3 disulfide bond, and
[0015] iii. optionally, a second intra-HCDR3 disulfide bond. In some embodiments of the method, the HCDR3 comprises the amino acid sequence of X¹CCX²CX³CX⁴, wherein X¹=4 amino acid residues, X²=4-7 amino acid residues, X³=6-8 amino acid residues, and X⁴=10-14 amino acid residues (SEQ ID NO: 1728); for example, in one embodiment, the HCDR3 comprises the amino acid sequence of (I/T)(S/T)X₃(F/Y)CCX₇(G/S)X₉X₁₀CX₁₂(N/S)X₁₄(D/E)TS(F/Y)CX₂₀(G/N)X₂₂X₂₃X₂₄,X₂₅ (F/Y)YX₂₈X₂₉(D/N)X₃₁, wherein X₃ is A, P, or S; X₇ is H, L, Q, or R; X₉ is A, G, K, or N; X₁₀ is A, N, Q, R, or S; X₁₂ is A, L, or P; X₁₄ is H, Q, R, or S; X₂₀ is A, G, or N; X₂₂ is Q, S, or Y; X₂₃ is D, F, N, or Y; X₂₄ is A, K, N, P, or Q; X₂₅ is D, Q, R, or S; X₂₈ is F, L, W, or Y; X₂₉ is F, M, or V; and X₃₁ is I, P, or V (SEQ ID NO: 1729). In another embodiment, the HCDR3 comprises the amino acid sequence of (I/T)(S/T)X₃(F/Y)X₅CX₇(G/S)X₉X₁₀CX₁₂X₁₃X₁₄(D/E)X₁₆SX₁₈X₁₉X₂₀X₂₁X₂₂X₂₃X₂₄X₂₅(F/Y)(F/Y)X₂₈X₂₉(D/N)X₃₁, wherein X₃ is A, P, S, or T; X₅ is A, C, or S; X₇ is H, L, Q, or R; X₉ is A, G, K, or N; X₁₀ is A, N, Q, R, or S; X₁₂ is A, L, or P; X₁₃ is A, N, or S; X₁₄ is H, Q, R, or S; X₁₆ is N, Q, or T; X₁₈ is F, M, or Y; X₁₉ is C, S, or V; X₂₀ is A, G, or N; X₂₁ is A, G, or N; X₂₂ is Q, S, or Y; X₂₃ is D, F, N, S, or Y; X₂₄ is A, K, N, P, Q, or S; X₂₅ is D, K, Q, R, or S; X₂₈ is F, L, W, or Y; X₂₉ is F, M, or V; and X₃₁ is I, P, or V. In some embodiment, the HCDR3 comprises the amino acid sequence of X¹CCX²CX³ C X⁴, wherein X¹=4 amino acid residues, X²=4 amino acid residues, X³=7 amino acid residues, and X⁴=12 amino acid residues (SEQ ID NO: 1731). In some embodiments, the HCDR3 comprises the amino acid sequence of X¹CGGX²CX³ wherein X¹=4 amino acid residues, X²=7 amino acid residues, and X³=12 amino acid residues (SEQ ID NO: 1732). In some embodiments, the HCDR3 comprises the amino acid sequence of X¹SCX²CX³ wherein X¹=4 amino acid residues, X²=4 amino acid residues, and X³=19 amino acid residues. In a further embodiment, the HCDR3 comprises the amino acid sequence of TSSFCCRGGSCPSHDTSYCGGQYKSYYYMDV (SEQ ID NO: 21) comprises at least 1, 2, 3, 4, 5, 6, 7, 8, 9, or 10 amino acid substitutions at positions that maintain the first disulfide bond and, optionally the second disfulfide bond.

[0016] In some embodiments of the method, the antibody comprises a pocket comprising amino acid residues 36, 37, 38, 39, 40, 52, 55, 58, 60, 61, 105, 106, 107, 108, 109, 111.5, 111.7, 111.8, 111.9, and 114 in the V_{H} per IMGT numbering and amino acid residues 37, 38, 40, 42, 55, 56, 107, and 116 in the V_{L} per IMGT numbering; and may further comprise one or more amino acid residues selected from the group consisting of 57, 111.6, 112.9, 112.7 and 116 in the V_{H} per IMGT numbering; and/or one or more amino acid residues selected from the group consisting of 39, 52, 57, 80, 105, and 106 in the V_{L} per IMGT numbering. In some embodiments, the pocket further comprises amino acid residues 57, 111.6, 112.9, 112.7 and 116 in the V_{H} per IMGT numbering; and/or amino acid residues 39, 52, 57, 80, 105, and 106 in the V_{L} per IMGT numbering. In some embodiments, the antibody comprises at least 1, 2, 3, 4, 5, 6, 7, 8, 9, 10, 11, 12, 13, 14, 15, 16, 17, 18, 19 or 20 of the following residues in the V_{H}: A, C, H, K, M, N or R at position 36; A or V at position 37, F, H, V, W, or Y at position 38; F, M or Y at position 39; S, T, or Y at position 40, W at position 52; F or R at position 55, A or S at position 58; D, H, Q, S, or T at position 60; D, E, N, or S at position 61; I, T, or V at position 105; F, S or T at position 106; A, P, S, or T at position 107; F or Y at position 108; A, C, or S at position 109; A, C, L or P at position 111.5; H, Q, R, or S at position 111.7; D or E at position 111.8; C, N, Q, or T at position 111.9; or C, F, L, W, or Y at position 114; and/or at least 1, 2, 3, 4, 5, 6, 7, or 8 of the following residues in the V_{L}: A, H, N, S, or T at position 37; A, D, F, S, T, or Y at position 38; A, D, E, L, S, T, or Y at position 40; Y at position 42; H or Y at position 55; A, H, K, M, N, or R at position 56; F, I or W at position 107; or H, K, Q, R, V, or W at position 116. In some embodiments, the antibody comprises at least 1, 2, 3, 4, or 5 of the following residues in the V_{H} per IMGT numbering: K or Q at position 57; A, C, D, N, or S at position 111.6; S at position 112.9; A, C, S, or V at position 112.7; or D or N at position 116; and/or at least 1, 2, 3, 4, 5, or 6 following residues in the V_{L} per IMGT numbering: T or V at position 39; L at position 52; D or N at position 57; K at position 80; A or S at position 105; or A, I, S, or T at position 106.

[0017] In some embodiments of the method, the pocket comprises at least 1, 2, 3, 4, 5, 6, 7, 8, 9, 10, 11, 12, 13, 14, 15, 16, 17, 18, 19 or 20 of the following residues in the V_{H}: K at position 36; A at position 37; W at position 38; F or M at position 39; S or T at position 40; W at position 52; R at position 55; A or S at position 58; D, S, or T at position 60; D at position 61; I or T at position 105; S or T at position 106; S at position 107; F at position 108; C at position 109; P at position 111.5; H, R, or S at position 111.7; D at position 111.8; T at position 111.9; or Y at position 114; and/or at least 1, 2, 3, 4, 5, 6, 7, or 8 of the following residues in the V_{L}: H, N, or S at position 37; D, S or Y at position 38; E, L, or S at position 40; Y at position 42; H or Y at position 55; K or R at position 56; I or W at position 107; or K, R, or W at position 116. In some embodiments, the antibody further comprises at least 1, 2, 3, 4, or 5 of the following residues in the V_{H} per IMGT numbering: K at position 57; S at position 111.6; S at position 112.9; C at position 112.7; or D at position 116; and/or at least 1, 2, 3, 4, 5, or 6 following residues in the V_{L} per IMGT numbering: V at position 39; L at position 52; N at position 57; K at position 80; A or S at position 105; or A or T at position 106.

[0018] In some embodiments of the methods, the scaffold antibody comprises an HCDR3 as set forth in Table 1B, Table 2B, Table 3B, or Table 4B. In further embodiments, the caffold antibody comprises the six CDRs of an antibody as set forth in Table 1B, Table 2B, Table 3B, or Table 4B.

[0019] In a further aspect of the methods, the method comprises generating a plurality of mutated scaffold antibodies; screening the mutated scaffold antibodies for binding to the second RNA-protein complex; and selecting a mutated scaffold antibody that binds to the second RNA-protein complex.

[0020] In another aspect of the disclosure, provided herein is a library comprising a plurality of mutated scaffold antibodies produced by the method as described herein, e.g., in the above paragraphs.

[0021] In some embodiments, a parent antibody that can be diversified to generate antibodies having new binding specificities comprises an HCDR1, HCDR2, HCDR3, LCDR1, LCDR2, and LCDR3 of a V_{H} or a V_{L} region of an antibody designated as AIP-192482, AIP-171142, AIP-165430, AIP-189526, AIP-122563, AIP-158623, AIP-155066, AIP-166120, AIP-133645, AIP-187893, AIP-142079, AIP-160470, AIP-102396, AIP-150055, AIP-167084, AIP-185304, AIP-134770, AIP-141887, AIP-196203, AIP-128195, AIP-116579, AIP-192329, AIP-197809, AIP-142489, AIP-167726, AIP-199834, AIP-143179, AIP-195587, AIP-153462, AIP-115363, AIP-151090, AIP-168083, AIP-161082, AIP-114196, AIP-189338, AIP-183190, AIP-110143, AIP-147176, AIP-134312, AIP-128243, AIP-156172, AIP-147389, AIP-124314, AIP-185291, AIP-135247, AIP-113513, AIP-102299, AIP-179097, AIP-109343, AIP-119622, AIP-191735, AIP-157078, AIP-153475, AIP-133650, AIP-190915, AIP-167400, AIP-109729, AIP-151709, AIP-136628, AIP-101601, AIP-146871, AIP-170053, AIP-199483, AIP-162041, AIP-180675, AIP-183133, AIP-191470, AIP-151167, AIP-106633, AIP-102624, AIP-109484, AIP-126080, AIP-161571, AIP-163039, AIP-101235, AIP-182061, AIP-181246, AIP-192216, AIP-171912, AIP-172872, AIP-167833, AIP-190051, AIP-145518, AIP-167533, AIP-112580, AIP-143155, AIP-119664, AIP-190526, AIP-114403, AIP-156760, AIP-103803, AIP-195588, AIP-145722, AIP-178251, AIP-116142, AIP-183350, AIP-127108, AIP-128147, AIP-109510, AIP-104086, AIP-143132, AIP-170105, AIP-169636, AIP-152243, AIP-138776, AIP-103817, AIP-130491, AIP-188155, AIP-167246, AIP-106139, AIP-198351, AIP-159326, AIP-192275, AIP-190761, AIP-166832, AIP-148062, AIP-129145, AIP-111240, AIP-153888, AIP-130915, AIP-109048, AIP-170569, AIP-154873, AIP-159037, AIP-186826, AIP-156514, AIP-157122, AIP-173276, AIP-150485, AIP-166847, AIP-124013, AIP-126285, AIP-168605, AIP-190274, AIP-136060, AIP-180422, AIP-166722, AIP-127782, AIP-189473, AIP-192571, AIP-112328, AIP-125258, AIP-150199, AIP-125062, AIP-177193, AIP-115388, AIP-107759, AIP-170221, AIP-143369, AIP-189475, AIP-102833, AIP-157045, AIP-175775, AIP-154181, AIP-125984, AIP-160829, AIP-184744, AIP-128136, AIP-181273, AIP-153125, AIP-131972, AIP-131762, AIP-194564, AIP-169752, AIP-185680, AIP-145328, AIP-182606, AIP-107388, AIP-191692, AIP-163723, AIP-167295, AIP-125646, or AIP-114111 in Table 1A, Table 2A, or Table 3A, or a variant thereof in which at least one, two, three, four, five, or all six of the CDRs contain 1 or 2 amino acid substitutions. In some embodiments, a parent antibody that can be diversified to generate antibodies having new binding specificities comprises an HCDR1, HCDR2, HCDR3, LCDR1, LCDR2, and LCDR3 of a V_{H} or a V_{L} region of an antibody designated as AIP-192482. AIP-186044, AIP-122563, AIP-160470, AIP-145518, AIP-167533, AIP-112580, AIP-150277, AIP-136060, or AIP-154708 in Table 4A, or a variant thereof in which at least one, two, three, four, five, or all six of the CDRs contain 1 or 2 amino acid substitutions.

[0022] In some embodiments, the antibody comprises an HCDR1, HCDR2, HCDR3, LCDR1, LCDR2, and LCDR3 of an antibody set forth in Table 1B, Table 2B, Table 3B, or Table 4B.

[0023] In a further aspect, the disclosure provides an antibody that binds to tumor tissue, wherein the antibody binds to an extracellular RNA-protein complex and wherein the antibody comprises:
[0024] a heavy chain variable region comprising:
[0025] an HCDR1 comprising the sequence GFTFSKAWMS (SEQ ID NO: 1), or a variant HCDR1 in which 1, 2, 3, 4, or 5 amino acids are substituted relative to the sequence;
[0026] an HCDR2 comprising the sequence RIKSVTDGETTDYAAPVKG (SEQ ID NO: 9), or a variant HCDR2 in which 1, 2, 3, 4, or 5 amino acids are substituted relative to the sequence; and
[0027] an HCDR3 comprising the sequence of an HCDR3 set forth in Table 3B, or a variant HCDR3 in which 1, 2, 3, 4, or 5 amino acids are substituted relative to the sequence; a light chain variable region comprising:
[0028] an LCDR1 comprising the sequence SGSSSNIGSSSVS (SEQ ID NO: 48), or a variant LCDR1 in which 1, 2, 3, 4, or 5 amino acids are substituted relative to the sequence;
[0029] an LCDR2 comprising the sequence KNNQRPS (SEQ ID NO: 59), or variant LCDR2 in which 1, 2, or 3 amino acids are substituted relative to the sequence; and
[0030] an LCDR3 comprising the sequence STWDDSLSVRV (SEQ ID NO: 68), or a variant
[0031] LCDR3 in which 1, 2, 3, 4, or 5 amino acids are substituted relative to the sequence.
   In some embodiments, the antibody comprises a CDR3 sequence:
[0032] TSSFCGGPSHDTSYCGGQYKSYYYMDV (SEQ ID NO: 1734),
[0033] TSSFCCRSGGSCPSHDTSYCGGQYKSYYYMDV (SEQ ID NO: 1735),
[0034] TSSFCCRGGGSCPSHDTSYCGGQYKSYYYMDV (SEQ ID NO: 1730),
[0035] TSSFCCRGGGGSCPSHDTSYCGGQYKSYYYMDV (SEQ ID NO: 1737),
[0036] TSSFCCRGGSGGSCPSHDTSYCGGQYKSYYYMDV (SEQ ID NO: 1738),
[0037] TSSFSCRGGSCPSHDTSYGGQYKSYYYMDV (SEQ ID NO: 1739),
[0038] TSSFCCRGGSCPSHDTSYCGGGQYKSYYYMDV (SEQ ID NO: 1740),
[0039] TSSFCCRGGSCPSHDTSYCGGGSGYKSYYYMDV (SEQ ID NO: 1741),
[0040] TSSFCCRGGSCPSHDTSYCGGQKSYYYMDV (SEQ ID NO: 1742),
[0041] TSSFCCRGGSCPSHDTSYCGGQYSYYYMDV (SEQ ID NO: 1743),
[0042] TSSFCCRGGSCPSHDTSYCGQYKSYYYMDV (SEQ ID NO: 1744), or
[0043] TSSFCCRGGSCPSHDTSYCGGQYKSSYYYMDV (SEQ ID NO: 1745); or a variant thereof having 1, 2, or 3 amino acid substitutions. In some embodiments, the antibody binds to an extracellular RNA-protein complex comprising a polyadenylate binding protein family member selected from PABPC 1 (PABPC1), PABPC 3 (PABPC3), or PABPC 4 (PABPC4). In some embodiments, the antibody binds to an extracellular RNA-protein complex comprising the PABPC family member is PABPC1.

[0044] In some embodiments, the disclosure provides an antibody that binds to tumor tissue, wherein the antibody comprises:
[0045] the HCDR1 comprises the sequence GFTFSKAWMS (SEQ ID NO: 1),
[0046] the HCDR2 comprises the sequence RIKSVTDGETTDYAAPVKG (SEQ ID NO: 9),
[0047] the HCDR3 comprises the sequence TSSFCCRGGSCPSHDTSYCGQYKSYYYMDV (SEQ ID NO: 1744) or
[0048] TSSFCCRGGSCPSHDTSYCGGQYKSSYYYMDV (SEQ ID NO: 1745),
[0049] the LCDR1 comprises the sequence SGSSSNIGSSSVS (SEQ ID NO: 48),
[0050] the LCDR2 comprises the sequence KNNQRPS (SEQ ID NO: 59), and
[0051] the LCDR3 comprises the sequence STWDDSLSVRV (SEQ ID NO: 68). In some embodiments, the antibody binds to an extracellular RNA-protein complex comprising a polyadenylate binding protein family member selected from PABPC 1 (PABPC1), PABPC 3 (PABPC3), or PABPC 4 (PABPC4). In some embodiments, the antibody binds to an extracellular RNA-protein complex comprising the PABPC family member is PABPC1.

### BRIEF DESCRIPTION OF THE DRAWINGS

[0052] FIG. 1 depicts a top view of the structure of AIP-192482 and pocket.

[0053] FIG. 2 depicts a front view of the structure of AIP-192482 and pocket.

[0054] FIG. 3 depicts a side view of the structure of AIP-192482 and pocket.

[0055] FIG. 4 depicts a front view of the pocket of AIP-192482, and shows the depth of the pocket.

[0056] FIG. 5 depicts the sub-loop structures of an HCDR3.

[0057] FIGS. 6A-6B1 provide the sequences of the V_{H} region and V_{L} region of AIP-192482 with conserved pocket residues indicated. Numbering is shown using Kabat, Chothia, and IMGT numbering systems. FIGS. 6A-6B1 disclose SEQ ID NOS 95 and 141, respectively, in order of appearance.

[0058] FIGS. 7A-7B1 provide the sequence of the V_{H} region and V_{L} region of AIP-192482 with pocket residues indicated, including additional pocket residues compared to FIGS. 6A-6B1. FIGS. 7A-7B1 disclose SEQ ID NOS 95 and 141, respectively, in order of appearance.

[0059] FIGS. 8A and 8B show residues observed in 10 exemplar scaffold antibodies at conserved pocket positions of the V_{H} and V_{L} regions.

[0060] FIGS. 9A and 9B show residues observed in 10 exemplar scaffold antibodies at majority conserved pocket positions of the V_{H} and V_{L} regions. FIG. 9A discloses SEQ ID NO: 1766.

[0061] FIGS. 10A and 10B show residues observed in 256 expressed scaffold antibodies at conserved pocket positions of the V_{H} and V_{L} regions.

[0062] FIGS. 11A and 11B show residues observed in 256 expressed scaffold antibodies at majority conserved pocket positions of the V_{H} and V_{L} regions.

[0063] FIG. 12 shows tumor growth data from a screen of a pool of antibodies (4 antibodies, each obtained from a lung cancer patient) and AIP-192482 antibody identified in the screen in combination with an anti-PD-1 antibody. Panel A, PBS control; Panel B, anti-PD1 antibody only; Panel C, anti-PD1 plus antibody pool; Panel E, combination of anti-PD1 antibody and AIP-192482.

[0064] FIGS. 13A-13C provide immunohistochemical data showing binding of initial lead antibody (FIG. 13A), variant AIP-133645 (FIG. 13B), and variant AIP-160470 (FIG. 13C) to tissue from tumors arising from human lung A549 cells, human pancreas BXPC3 cells, human colon cancer Colo-205 cells, or human prostate cancer PC3 cells; and tumor arising from mouse colon, breast, lung, or kidney cancer cell lines.

[0065] FIG. 14 provides the results of an analysis of AIP-192482-target complex immunoprecipitates treated with RNase or DNase.

[0066] FIG. 15 shows the results of SDS PAGE analysis of immunoprecipitation using lysate from unlabelled A549 cells s incubated with AIP-192482-conjugated M-280 beads and then crosslinked.

[0067] FIG. 16 shows gel filtration purification of AIP-192482-antigen complex.

[0068] FIGS. 17A-17G shows variant activity in an in vitro FcR engagement assay.

[0069] FIG. 18 provides data showing binding of variants to EMT6 ex vivo cells in correlation with in vivo data.

[0070] FIG. 19 provides data showing that binding of variants to ex vivo EMT6 cells correlates with in vivo outcome. C=a control anti-EGFR antibody

### DETAILED DESCRIPTION

### Terminology

[0071] As used in herein, the singular forms “a”, “an” and “the” include plural referents unless the content clearly dictates otherwise. Thus, for example, reference to “an antibody” optionally includes a combination of two or more such molecules, and the like.

[0072] The term “about” as used herein refers to the usual error range for the respective value readily known to the skilled person in this technical field, for example ±20%, ±10%, or ±5%, are within the intended meaning of the recited value.

[0073] As used herein, the term “antibody” means an isolated or recombinant binding agent that comprises the necessary variable region sequences to specifically bind an antigenic epitope. Therefore, an “antibody” as used herein is any form of antibody of any class or subclass or fragment thereof that exhibits the desired biological activity, e.g., binding a specific target antigen. Thus, it is used in the broadest sense and specifically covers a monoclonal antibody (including full-length monoclonal antibodies), human antibodies, chimeric antibodies, nanobodies, diabodies, multispecific antibodies (e.g., bispecific antibodies), and antibody fragments including but not limited to scFv, Fab, and the like so long as they exhibit the desired biological activity.

[0074] “Antibody fragments” comprise a portion of an intact antibody, for example, the antigen-binding or variable region of the intact antibody. Examples of antibody fragments include Fab, Fab′, F(ab′)₂, and Fv fragments; diabodies; linear antibodies (e.g., Zapata et al., Protein Eng. 8(10): 1057-1062 (1995)); single-chain antibody molecules (e.g., scFv); and multispecific antibodies formed from antibody fragments. Papain digestion of antibodies produces two identical antigen-binding fragments, called “Fab” fragments, each with a single antigen-binding site, and a residual “Fc” fragment, a designation reflecting the ability to crystallize readily. Pepsin treatment yields an F(ab′)₂ fragment that has two antigen combining sites and is still capable of cross-linking antigen.

[0075] An RNA-protein complex” refers to a complex that is associated with a cell, or a plurality of cells. The complex need not be integrated into the external surface of the cells, but in some embodiments, may be associated with the outside of cells as a conglomeration or aggregate of RNA and protein molecules interacting with the cell membrane, or otherwise present outside of the cell. An extracellular RNA-protein complex may also be present internally in a cell.

[0076] As used herein, “V-region” refers to an antibody variable region domain comprising the segments of Framework 1, CDR1, Framework 2, CDR2, and Framework 3, including CDR3 and Framework 4. The heavy chain V-region, V_{H}, is a consequence of rearrangement of a V-gene (HV), a D-gene (HD), and a J-gene (HJ), in what is termed V(D)J recombination during B-cell differentiation. The light chain V-region, V_{L}, is a consequence of rearrangement of a V-gene (LV) and a J-gene (LJ).

[0077] As used herein, “complementarity-determining region (CDR)” refers to the three hypervariable regions in each chain that interrupt the four “framework” regions established by the light and heavy chain variable regions. The CDRs are the primary contributors to binding to an epitope of an antigen. The CDRs of each chain are referred to as CDR1, CDR2, and CDR3, numbered sequentially starting from the N-terminus, and are also identified by the chain in which the particular CDR is located. Thus, for example, a V_{H} CDR3 (HCDR3) is located in the variable domain of the heavy chain of the antibody in which it is found, whereas a V_{L} CDR3 (LCDR3) is the CDR3 from the variable domain of the light chain of the antibody in which it is found.

[0078] The amino acid sequences of the CDRs and framework regions can be determined using various well known definitions in the art, e.g., Kabat, Chothia, international ImMunoGeneTics database (IMGT), and AbM (see, e.g., Chothia & Lesk, 1987, Canonical structures for the hypervariable regions of immunoglobulins. J. Mol. Biol. 196, 901-917; Chothia C. et al., 1989, Conformations of immunoglobulin hypervariable regions. Nature 342, 877-883; Chothia C. et al., 1992, structural repertoire of the human VH segments J. Mol. Biol. 227, 799-817; Al-Lazikani et al., J. Mol. Biol 1997, 273(4)). Definitions of antigen combining sites are also described in the following: Ruiz et al., IMGT, the international ImMunoGeneTics database. Nucleic Acids Res., 28, 219-221 (2000); and Lefranc, M.-P. IMGT, the international ImMunoGeneTics database. Nucleic Acids Res. January 1; 29(1):207-9 (2001); MacCallum et al, Antibody-antigen interactions: Contact analysis and binding site topography, J. Mol. Biol., 262 (5), 732-745 (1996); and Martin et al, Proc. Natl Acad. Sci. USA, 86, 9268-9272 (1989); Martin, et al, Methods Enzymol., 203, 121-153, (1991); Pedersen et al, Immunomethods, 1, 126, (1992); and Rees et al, In Stenberg M. J. E. (ed.), Protein Structure Prediction. Oxford University Press, Oxford, 141-172 1996). Reference to CDRs as determined by Kabat numbering are based, for example, on Kabat et al., Sequences of Proteins of Immunological Interest, 5th Ed. Public Health Service, National Institute of Health, Bethesda, MD (1991)). Chothia CDRs are determined as defined by Chothia (see, e.g., Chothia and Lesk J. Mol. Biol. 196:901-917 (1987)).

[0079] An “Fc region” refers to the constant region of an antibody excluding the first constant region immunoglobulin domain. Thus, e.g., for human immunoglobulins, “Fc” refers to the last two constant region immunoglobulin domains of IgA, IgD, and IgG, and the last three constant region immunoglobulin domains of IgE and IgM, and the flexible hinge N-terminal to these domains. For IgA and IgM Fc may include the J chain. For IgG, Fc comprises immunoglobulin domains Cγ2 and Cγ3 and the hinge between Cγ1 and Cγ. It is understood in the art that the boundaries of the Fc region may vary, however, the human IgG heavy chain Fc region is usually defined to comprise residues C226 or P230 to its carboxyl-terminus, using the numbering according to the EU index as in Kabat et al. (1991, NIH Publication 91-3242, National Technical Information Service, Springfield, Va.). The term “Fc region” may refer to this region in isolation or this region in the context of an antibody or antibody fragment. “Fc region” includes naturally occurring allelic variants of the Fc region as well as modified Fc regions, e.g., that are modified to modulate effector function or other properties such as pharmacokinetics, stability or production properties of an antibody. Fc regions also include variants that do not exhibit alterations in biological function. For example, one or more amino acids can be deleted from the N-terminus or C-terminus of the Fc region of an immunoglobulin without substantial loss of biological function. Such variants can be selected according to general rules known in the art so as to have minimal effect on activity (see, e.g., Bowie, et al., Science 247:306-1310, 1990). For example, for IgG4 antibodies, a single amino acid substitution (S228P according to Kabat numbering; designated IgG4Pro) may be introduced to abolish the heterogeneity observed in recombinant IgG4 antibody (see, e.g., Angal, et al., Mol Immunol 30:105-108, 1993).

[0080] An “EC₅₀” as used herein in the context of an Fc receptor engagement assay, refers to the half maximal effective concentration, which is the concentration of an antibody that induces a response (signal generated in engagement assay) halfway between the baseline and maximum after a specified exposure time. Fc receptor engagement assays are further described herein in the “Variant Binding Activity” section. In some embodiments, the “fold over EC₅₀” is determined by dividing the EC₅₀ of a reference antibody by the EC₅₀ of the test antibody.

[0081] The term “equilibrium dissociation constant” abbreviated (K_{D}), refers to the dissociation rate constant (k_{d}, time⁻¹) divided by the association rate constant (kₐ, time⁻¹ M⁻¹). Equilibrium dissociation constants can be measured using any method. Thus, in some embodiments antibodies comprising a scaffold region as described in the present disclosure bind to a target, e.g., RNA-protein complex, with a K_{D} of less than about 50 nM, typically less than about 25 nM, or less than 10 nM, e.g., less than about 5 nM or than about 1 nM and often less than about 10 nM as determined by surface plasmon resonance analysis using a biosensor system such as a Biacore® system performed at 37° C. In some embodiments, an antibody comprising a scaffold region of the present disclosure binds to a target, e.g., an RNA-protein complex, with a K_{D} of less than 5×10⁻⁵ M, less than 10⁻⁵ M, less than 5×10⁻⁶ M, less than 10⁻⁶ M, less than 5×10⁻⁷ M, less than 10⁻⁷ M, less than 5×10⁻⁸ M, less than 10⁻⁸ M, less than 5×10⁻⁹ M, less than 10⁻⁹ M, less than 5×10⁻¹⁰ M, less than 10⁻¹⁰ M, less than 5×10⁻¹¹ M, less than 10⁻¹¹ M, less than 5×10⁻¹² M, less than 10⁻¹² M, less than 5×10¹³ M, less than 10⁻¹³ M, less than 5×10⁻¹⁴ M, less than 10⁻¹⁴ M, less than 5×10⁻¹⁵ M, or less than 10⁻¹⁵ M or lower as measured as a bivalent antibody. In the context of the present invention, an “improved” K_{D} refers to a lower K_{D}. In some embodiments, an antibody comprising a scaffold region as described herein binds to a target, e.g., RNA-protein complex, with a K_{D} of less than 5×10⁻⁵ M, less than 10⁻⁵ M, less than 5×10⁻⁶ M, less than 10⁻⁶ M, less than 5×10⁻⁷ M, less than 10⁻⁷ M, less than 5×10⁻⁸ M, less than 10⁻⁸M, less than 5×10⁻⁹ M, less than 10⁻⁹ M, less than 5×10⁻¹⁰ M, less than 10⁻¹⁰ M, less than 5×10⁻¹¹ M, less than 10⁻¹¹ M, less than 5×10⁻¹² M, less than 10⁻¹² M, less than 5×10⁻¹³ M, less than 10⁻¹³ M, less than 5×10⁻¹⁴ M, less than 10⁻¹⁴ M, less than 5×10⁻¹⁵ M, or less than 10⁻¹⁵ M or lower as measured as a monovalent antibody, such as a monovalent Fab. In some embodiments, the antibody binds to the target, e.g., RNA-protein complex, with a K_{D} less than 100 pM, e.g., or less than 75 pM, e.g., in the range of 1 to 100 pM, when measured by surface plasmon resonance analysis using a biosensor system such as a Biacore® system performed at 37° C. In some embodiments, the antibody has a K_{D} of greater than 100 pM, e.g., in the range of 100-1000 pM or 500-1000 pM when measured by surface plasmon resonance analysis using a biosensor system such as a Biacore® system performed at 37° C.

[0082] The terms “identical” or percent “identity,” in the context of two or more polypeptide sequences, refer to two or more sequences or subsequences that are the same or have a specified percentage of amino acid residues that are the same (e.g., at least 70%, at least 75%, at least 80%, 85%, 90%, 91%, 92%, 93%, 94%, 95%, 96%, 97%, 98%, 99%, or higher) identity over a specified region, e.g., the length of the two sequences, when compared and aligned for maximum correspondence over a comparison window or designated region. Alignment for purposes of determining percent amino acid sequence identity can be performed in various methods, including those using publicly available computer software such as BLAST, BLAST-2, ALIGN or Megalign (DNASTAR) software. Examples of algorithms that are suitable for determining percent sequence identity and sequence similarity the BLAST 2.0 algorithms, which are described in Altschul et al., Nuc. Acids Res. 25:3389-3402 (1977) and Altschul et al., J. Mol. Biol. 215:403-410 (1990). Thus, for purposes of this invention, BLAST 2.0 can be used with the default parameters to determine percent sequence identity.

[0083] The terms “corresponding to,” “determined with reference to,” or “numbered with reference to” when used in the context of the identification of a given amino acid residue in a polypeptide sequence, refers to the position of the residue of a specified reference sequence when the given amino acid sequence is maximally aligned and compared to the reference sequence. Thus, for example, an amino acid residue in a V_{H} region polypeptide “corresponds to” an amino acid in the V_{H} region of SEQ ID NO:1 when the residue aligns with the amino acid in SEQ ID NO:1 when optimally aligned to SEQ ID NO:1. The polypeptide that is aligned to the reference sequence need not be the same length as the reference sequence.

[0084] A “conservative” substitution as used herein refers to a substitution of an amino acid such that charge, polarity, hydropathy (hydrophobic, neutral, or hydrophilic), and/or size of the side group chain is maintained. Illustrative sets of amino acids that may be substituted for one another include (i) positively-charged amino acids Lys and Arg; and His at pH of about 6; (ii) negatively charged amino acids Glu and Asp; (iii) aromatic amino acids Phe, Tyr and Trp; (iv) nitrogen ring amino acids His and Trp; (v) aliphatic hydrophobic amino acids Ala, Val, Leu and Ile; (vi) hydrophobic sulfur-containing amino acids Met and Cys, which are not as hydrophobic as Val, Leu, and Ile; (vii) small polar uncharged amino acids Ser, Thr, Asp, and Asn (viii) small hydrophobic or neutral amino acids Gly, Ala, and Pro; (ix) amide-comprising amino acids Asn and Gln; and (xi) beta-branched amino acids Thr, Val, and Ile. Reference to the charge of an amino acid in this paragraph refers to the charge at pH 6-7.

[0085] The terms “nucleic acid” and “polynucleotide” are used interchangeably and as used herein refer to both sense and anti-sense strands of RNA, cDNA, genomic DNA, and synthetic forms and mixed polymers of the above. In particular embodiments, a nucleotide refers to a ribonucleotide, deoxynucleotide or a modified form of either type of nucleotide, and combinations thereof. The terms also include, but is not limited to, single- and double-stranded forms of DNA. In addition, a polynucleotide, e.g., a cDNA or mRNA, may include either or both naturally occurring and modified nucleotides linked together by naturally occurring and/or non-naturally occurring nucleotide linkages. The nucleic acid molecules may be modified chemically or biochemically or may contain non-natural or derivatized nucleotide bases, as will be readily appreciated by those of skill in the art. Such modifications include, for example, labels, methylation, substitution of one or more of the naturally occurring nucleotides with an analogue, internucleotide modifications such as uncharged linkages (e.g., methyl phosphonates, phosphotriesters, phosphoramidates, carbamates, etc.), charged linkages (e.g., phosphorothioates, phosphorodithioates, etc.), pendent moieties (e.g., polypeptides), intercalators (e.g., acridine, psoralen, etc.), chelators, alkylators, and modified linkages (e.g., alpha anomeric nucleic acids, etc.). The above term is also intended to include any topological conformation, including single-stranded, double-stranded, partially duplexed, triplex, hairpinned, circular and padlocked conformations. A reference to a nucleic acid sequence encompasses its complement unless otherwise specified. Thus, a reference to a nucleic acid molecule having a particular sequence should be understood to encompass its complementary strand, with its complementary sequence. The term also includes codon-optimized nucleic acids that encode the same polypeptide sequence.

[0086] The term “vector,” as used herein, refers to a nucleic acid molecule capable of propagating another nucleic acid to which it is linked. The term includes the vector as a self-replicating nucleic acid structure as well as the vector incorporated into the genome of a host cell into which it has been introduced. A “vector” as used here refers to a recombinant construct in which a nucleic acid sequence of interest is inserted into the vector. Certain vectors are capable of directing the expression of nucleic acids to which they are operatively linked. Such vectors are referred to herein as “expression vectors”.

[0087] A “substitution,” as used herein, denotes the replacement of one or more amino acids or nucleotides by different amino acids or nucleotides, respectively.

[0088] An “isolated” nucleic acid refers to a nucleic acid molecule that has been separated from a component of its natural environment. An isolated nucleic acid includes a nucleic acid molecule contained in cells that ordinarily contain the nucleic acid molecule, but the nucleic acid molecule is present extrachromosomally or at a chromosomal location that is different from its natural chromosomal location.

[0089] “Isolated nucleic acid encoding an antibody or fragment thereof” refers to one or more nucleic acid molecules encoding antibody heavy or light chains (or fragments thereof), including such nucleic acid molecule(s) in a single vector or separate vectors, and such nucleic acid molecule(s) present at one or more locations in a host cell.

[0090] The terms “host cell,” “host cell line,” and “host cell culture” are used interchangeably and refer to cells into which exogenous nucleic acid has been introduced, including the progeny of such cells. Thus, a host cell is a recombinant host cells and includes the primary transformed cell and progeny derived therefrom without regard to the number of passages.

[0091] A polypeptide “variant,” as the term is used herein, is a polypeptide that typically differs from one or more polypeptide sequences specifically disclosed herein in one or more substitutions, deletions, additions and/or insertions. “Diversifying” an antibody sequence refers to introducing mutations to generate variants.

Scaffold Antibody that Bind to an RNA-Protein Complex

[0092] In one aspect, provided herein are scaffold antibodies that bind to an RNA-protein complex where the antibody comprises a scaffold region that has a distinct structure that favors binding interactions with an RNA-protein structure, as further detailed below. Such antibodies can be used as a template to generate antibodies having new binding specificities. A “scaffold antibody” provided herein comprises an HCDR3 at least 25 amino acid in length having at least one, and in some embodiments two, disulfide bonds in the HCDR3 loop. A second important structural feature of a scaffold antibody provided herein is a deep pocket formed between the V_{H} and V_{L} domains as further detailed below. The antibody scaffold provides an initial template in which the sequence can be diversified and the variant sequences then evaluated in vitro for binding activity to identify antibodies that have altered binding specificity compared to the parent antibody employed as a scaffold.

[0093] A crystal structure of an antibody (referred to as AIP-192482) comprising a scaffold region as described herein was obtained. AIP-192482 binds an extracellular RNA-protein complex comprising polyadenylated RNA and the polyadenylate-binding protein 1 (PABP-1), also referred to as PABPC-1. The sequences of the antibody V_{H} and V_{L} regions are provided in Table TA (entry no. 19) and Table 4A (entry no. 1). AIP-192482 CDR sequences are provided in Table 1B and Table 4B. This antibody has an unusually long (31-residue) HCDR3 loop. The HCDR3 loop additionally comprises two internal disfulfide bonds. The two intra-HCDR3 disulfide bonds serve to structurally divide the HCDR3 into three sub-loops: a tight, constrained loop from positions 105-108 (as numbered in the V_{H} region sequence shown in Table TA, SEQ ID NO:95); a longer, more flexible loop from positions 110-116 (also as numbered in Table 1A), including the three residues 112-114 that were not resolved in the crystal structure; and a loop from 118-124 (as numbered in Table TA). The HCDR3 loop has a structure similar to a knob that is situated so that it is tilted away from the center of the antibody, exposing a pocket. Although a class of bovine antibodies has been identified that has ultra-long HCDR3 loops that also contain disulfide bonds within the HCDR3 loops, these loops are longer (60 or more amino acids in length) than the loops of an antibody comprising a scaffold region as described herein. The additional residues in the bovine HCDR3 loops form long stalks of secondary structure that project the knob away from the surface of the Fv. In contrast, the HCDR3 loop of a scaffold antibody as described herein has a structure similar to a knob that is situated so that it is tilted away from the center of the antibody, exposing a pocket. FIGS. 1, 2, and 3 provide top, front, and side views of the Fv region and pocket of the antibody, respectively. The pocket structure is shown in FIG. 4. The sub-loop structures are depicted in FIG. 5.

[0094] In the present disclosure, a scaffold antibody comprises a pocket from about 12 Å-21 Å in depth. In some embodiments, the pocket is about 13 Å-20 Å deep. In some embodiments, the pocket regions is about 14 Å-19 Å in depth.

[0095] The pocket region of a scaffold antibody provided in the present disclosure comprises amino acid residues 36, 37, 38, 39, 40, 52, 55, 58, 60, 61, 105, 106, 107, 108, 109, 111.5, 111.7, 111.8, 111.9, and 114 in the V_{H} per IMGT numbering and amino acid residues 37, 38, 40, 42, 55, 56, 107, and 116 in the V_{L} per IMGT numbering. The pocket may further comprise one or more amino acid residues selected from the group consisting of 57, 111.6, 112.9, 112.7 and 116 in the V_{H} per IMGT numbering; or one or more amino acid residues selected from the group consisting of 39, 52, 57, 80, 105, and 106 in the V_{L} per IMGT numbering. In some embodiments, the antibody employed as a scaffold comprises residues 57, 111.6, 112.9, 112.7 and 116 in the V_{H} per IMGT numbering and residues 39, 52, 57, 80, 105, and 106 in the V_{L} per IMGT numbering. Pocket residues are shown in FIGS. 6A-10D.

[0096] In some embodiments, a scaffold antibody comprises at least 1, 2, 3, 4, 5, 6, 7, 8, 9, 10, 11, 12, 13, 14, 15, 16, 17, 18, 19 or 20 of the following residues in the V_{H}: A, C, H, K, M, N or R at position 36; A or V at position 37, F, H, V, W, or Y at position 38; F, M or Y at position 39; S, T, or Y at position 40, W at position 52; F or R at position 55, A or S at position 58; D, H, Q, S, or T at position 60; D, E, N, or S at position 61; I, T, or V at position 105; F, S or T at position 106; A, P, S, or T at position 107; F or Y at position 108; A, C, or S at position 109; A, C, L or P at position 111.5; H, Q, R, or S at position 111.7; D or E at position 111.8; C, N, Q, or T at position 111.9; or C, F, L, W, or Y at position 114; and/or at least 1, 2, 3, 4, 5, 6, 7, or 8 of the following residues in the V_{L}: A, H, N, S, or T at position 37; A, D, F, S, T, or Y at position 38; A, D, E, L, S, T, or Y at position 40; Y at position 42; H or Y at position 55; A, H, K, M, N, or R at position 56; F, I or W at position 107; or H, K, Q, R, V, or W at position 116. In some embodiments, the antibody comprises at least 1, 2, 3, 4, or 5 of the following residues in the V_{H} per IMGT numbering: K or Q at position 57; A, C, D, N, or S at position 111.6; S at position 112.9; A, C, S, or V at position 112.7; or D or N at position 116; and/or at least 1, 2, 3, 4, 5, or 6 following residues in the V_{L} per IMGT numbering: T or V at position 39; L at position 52; D or N at position 57; K at position 80; A or S at position 105; or A, I, S, or T at position 106. In some embodiments, the antibody comprises a substitution at one or more of the designated positions, where the substitution is a conservative substitution.

[0097] In some embodiments, the pocket comprises at least 1, 2, 3, 4, 5, 6, 7, 8, 9, 10, 11, 12, 13, 14, 15, 16, 17, 18, 19 or 20 of the following residues in the V_{H}: K at position 36; A at position 37; W at position 38; F or M at position 39; S or T at position 40; W at position 52; R at position 55; A or S at position 58; D, S, or T at position 60; D at position 61; I or T at position 105; S or T at position 106; S at position 107; F at position 108; C at position 109; P at position 111.5; H, R, or S at position 111.7; D at position 111.8; T at position 111.9; or Y at position 114; and/or at least 1, 2, 3, 4, 5, 6, 7, or 8 of the following residues in the VL: H, N, or S at position 37; D, S or Y at position 38; E, L, or S at position 40; Y at position 42; H or Y at position 55; K or R at position 56; I or W at position 107; or K, R, or W at position 116. In some embodiments, the antibody further comprises at least 1, 2, 3, 4, or 5 of the following residues in the V_{H} per IMGT numbering: K at position 57; S at position 111.6; S at position 112.9; C at position 112.7; or D at position 116; and/or at least 1, 2, 3, 4, 5, or 6 following residues in the V_{L} per IMGT numbering: V at position 39; L at position 52; N at position 57; K at position 80; A or S at position 105; or A or T at position 106.

[0098] The HCDR3 of a scaffold antibody provided herein is at least 25 amino acids in length. In some embodiments, the HCDR3 length is 25 to 37 amino acids in length. In some embodiments, the length is 27 to 36 amino acids. In some embodiments, the length ranges from 29 to 35 amino acids. In illustrative embodiments, the HCDR3 comprises the amino acid sequence of X¹CCX²CX³CX⁴, wherein X¹=4 amino acid residues, X²=4-7 amino acid residues, X³=6-8 amino acid residues, and X⁴=10-14 amino acid residues (SEQ ID NO: 1728). In other embodiments, the CDR3 comprises the amino acid sequence of X¹CCX²CX³CX⁴, wherein X¹=4 amino acid residues, X²=4 amino acid residues, X³=7 amino acid residues, and X⁴=12 amino acid residues (SEQ ID NO: 1731). In alternative embodiments, the HCDR3 comprises the amino acid sequence of X¹CGGX²CX³ wherein X¹=4 amino acid residues, X²=7 amino acid residues, and X³=12 amino acid residues (SEQ ID NO: 1732). In some embodiments, the HCDR3 comprises the amino acid sequence of X¹SCX²CX³ wherein X¹=4 amino acid residues, X²=4 amino acid residues, and X³=19 amino acid residues.

[0099] In some embodiments, the HCDR3 comprises the amino acid sequence of (I/T)(S/T)X₃(F/Y)CCX₇(G/S)X₉X₁₀CX₁₂(N/S)X₁₄(D/E)TS(F/Y)CX₂₀(G/N)X₂₂X₂₃X₂₄,X₂₅ (F/Y)YX₂₈X₂₉(D/N)X₃₁, wherein X₃ is A, P, or S; X₇ is H, L, Q, or R; X₉ is A, G, K, or N; X₁₀ is A, N, Q, R, or S; X₁₂ is A, L, or P; X₁₄ is H, Q, R, or S; X₂₀ is A, G, or N; X₂₂ is Q, S, or Y; X₂₃ is D, F, N, or Y; X₂₄ is A, K, N, P, or Q; X₂₅ is D, Q, R, or S; X₂₈ is F, L, W, or Y; X₂₉ is F, M, or V; and X₃₁ is I, P, or V (SEQ ID NO: 1729). In some embodiments, the HCDR3 comprises the amino acid sequence of (I/T)(S/T)X₃(F/Y)X₅CX₇(G/S)X₉X₁₀CX₁₂X₁₃X₁₄(D/E)X₁₆SX₁₈X₁₉X₂₀X₂₁X₂₂X₂₃X₂₄X₂₅(F/Y)(F/Y)X₂₈X₂₉(D/N)X₃₁, wherein X₃ is A, P, S, or T; X₅ is A, C, or S; X₇ is H, L, Q, or R; X₉ is A, G, K, or N; X₁₀ is A, N, Q, R, or S; X₁₂ is A, L, or P; X₁₃ is A, N, or S; X₁₄ is H, Q, R, or S; X₁₆ is N, Q, or T; X₁₈ is F, M, or Y; X₁₉ is C, S, or V; X₂₀ is A, G, or N; X₂₁ is A, G, or N; X₂₂ is Q, S, or Y; X₂₃ is D, F, N, S, or Y; X₂₄ is A, K, N, P, Q, or S; X₂₅ is D, K, Q, R, or S; X₂₈ is F, L, W, or Y; X₂₉ is F, M, or V; and X₃₁ is I, P, or V.

[0100] In some embodiments, a scaffold antibody described herein that can be employed as a parent antibody for diversification to identify new antibodies with altered binding specificity comprises a V_{H} region and a V_{L} region of an antibody identified by AIP number as set forth in any of Tables 1A, 2A, 3A, or 4A. In some embodiments, a scaffold antibody provided herein comprises a V_{H} region and a V_{L} region of an antibody identified by AIP number as set forth in any of Tables 1A, 2A, 3A, or 4A, with the proviso that the antibody is not AIP-192482. In some embodiments, the scaffold antibody comprises a V_{H} region and a V_{L} region of an antibody identified by AIP number as set forth in Table 1A. In some embodiments, the scaffold antibody comprises a V_{H} region and a V_{L} region of an antibody identified by AIP number as set forth in Table 2A. In some embodiments, the scaffold antibody comprises a V_{H} region and a V_{L} region of an antibody identified by AIP number as set forth in Table 3A. In some embodiments, the parent antibody comprises an antibody identified by AIP number as set forth in Table 4A.

[0101] In some embodiments, a scaffold antibody described herein that can be employed as a parent antibody for diversification to identify new antibodies with altered binding specificity comprises a V_{H} region and/or a V_{L} region that has 95% identity to the V_{H} region and/or V_{L} region of an antibody identified by AIP number as set forth in any of Tables 1A, 2A, 3A, and 4A. In some embodiments, the scaffold antibody comprises a V_{H} region and/or a V_{L} region that has 95% identity to the V_{H} region and/or V_{L} region of an antibody identified by AIP number as set forth in Table 1A. In some embodiments, the scaffold antibody comprises a V_{H} region and/or a V_{L} region that has 95% identity to the V_{H} region and/or V_{L} region of an antibody identified by AIP number as set forth in Table 2A. In some embodiments, the scaffold antibody comprises a V_{H} region and/or a V_{L} region that has 95% identity to the V_{H} region and/or V_{L} region of an antibody identified by AIP number as set forth in Table 3A. In some embodiments, the scaffold antibody comprises a V_{H} region and/or a V_{L} region that has 95% identity to the V_{H} region and/or V_{L} region of an antibody identified by AIP number as set forth in Table 4A.

[0102] In some embodiments, a scaffold antibody described herein that can be employed as a parent antibody for diversification to identify new antibodies with altered binding specificity compared to the parent antibody comprises at least one, two, three, four or five CDRs of an antibody identified by AIP number as set forth in any of Tables 1B, 2B, or 3B. In some embodiments, the scaffold antibody comprises six CDRs of an antibody identified by AIP number as set forth in Table 1B. In some embodiments, the scaffold antibody comprises six CDRs of an antibody identified by AIP number as set forth in Table 2B. In some embodiments, the scaffold antibody comprises six CDRs of an antibody identified by AIP number as set forth in Table 3B.

[0103] In some embodiments, a scaffold antibody described herein that can be employed as a parent antibody for diversification to identify new antibodies with altered binding specificity comprises at least one, two, three, four or five CDRs of an antibody identified by AIP number as set forth in any of Tables 1B, 2B, 3B, or 4B in which 1, 2, or 3 amino acids one or more of the CDRs are substituted with a conservative substitution.

[0104] In Tables 1A and 2A, position 140, as numbered with respect to V_{H} region sequences presented in Tables 1A and 2A, and position 110 of the V_{L} region sequences presented in Tables 1A and 2A are considered to be the last amino acids of the V_{H} and V_{L} regions, respectively, according to EU index numbering. Similarly, the last residue shown in each V_{H} and V_{L} sequence in Table 3A, although not corresponding to positions 140 and 110, respectively, of the sequences, is also considered to the last amino acids of the V_{H} and V_{L} regions. In a human IgG format (e.g., IgG1, IgG2, IgG3, or IgG4), the subsequent residue is termed the “junction codon”, and is natively encoded by the junction of the final 3′ base of the variable region gene (HJ or LJ) with the first two 5′ bases of the constant region gene (heavy or light), and exhibits amino acid variation due to variation in the final 3′ base of HJ and U. The human heavy chain junction codon can natively be Ala, Ser, Pro, or Thr, and is usually an Ala. The human kappa chain junction codon can natively be Arg or Gly, and is usually an Arg. The human lambda chain junction codon can natively be Gly, Ser, Arg, or Cys, and is usually a Ser or Gly.

[0105] CDRs as shown in Tables 1B, 2B, and 3B are defined by IMGT and Kabat. The heavy chain CDRs encompass amino acid residues from amino acid residues 26-35 (HCDR1), 50-68 (HCDR2) and 99-129 (HCDR3). The light chain CDRs encompass amino acid residues from amino acid residues 23-35 (LCDR1), 51-57 (LCDR2), and 90-100 (LCDR3). The numbering of the residues correspond to the positions in the V_{H} and V_{L} sequences in Tables 1A and 2A. The V_{H} CDRs as listed in Tables 1B, 2B, and 3B are defined as follows: HCDR1 is defined by combining Kabat and IMGT; HCDR2 is defined by Kabat; and the HCDR3 is defined by IMGT. The V_{L} CDRs as listed in Tables 1B, 2B, and 3B are defined by Kabat. As known in the art, numbering and placement of the CDRs can differ depending on the numbering system employed. It is understood that disclosure of a variable heavy and/or variable light sequence includes the disclosure of the associated CDRs, regardless of the numbering system employed.

### Diversifying a Parent Scaffold Antibody

[0106] In order to generate a library of diversified antibodies for screening, mutations are introduced into a parent scaffold antibody as described herein. Antibody vH and VL regions are expressed as disclosed herein are commonly produced using vectors and recombinant methodology well known in the art (see, e.g., Current Protocols in Molecular Biology (Ausubel, et al., John Wiley and Sons, New York, 2009 and updates through 2020).

[0107] Mutagenesis techniques are well known in the art in which nucleic acids encoding the antibody sequences are mutagenized. Mutagenesis techniques include, without limitation, directed evolution, oligonucleotide-directed mutagenesis, chemical mutagenesis, and error prone PCR techniques. For example, in some embodiments, oligonucleotide-directed mutagenesis techniques such as Kunkel mutagenesis (Kunkel et al., Methods Enzymol. 154:367-82, 1987), and variations of this protocol; or PCR site-directed mutagenesis techniques, may be employed to preserve scaffold structural elements. Other positions in a parent scaffold antibody may be mutagenized using additional mutagenesis methods, such as site-saturation mutagenesis, or cassette replacement, to enhance diversity outside of the preserved scaffold structural elements.

[0108] A library of diversified sequences can be expressed in any sort of expression system for screening that provides the ability to screen Fv regions. Such antibodies can be expressed in any suitable format, including expression as scFvs or Fabs. In some embodiments, Fv regions can be expressing the context of an IgG or other suitable format. In some embodiments, a library comprises at least 100, at least 1000, at least 10,000, at least 100,000, at least 1,000,000, or more members.

[0109] Suitable expression systems for screening antibodies for binding activity include, for example, phage display, yeast display, ribosome display, mRNA display, or mammalian cell display. Any other suitable insect, plant, or mammalian expression system can be employed to screen diversified libraries.

### Screening of Diversified Libraries

[0110] Diversified antibodies can be screened to identify antibodies that have a binding specificity that differs from the parent antibody as further described below. In some embodiments, a defined RNA-protein complex is used in the screening assay. In some embodiments, cells or tissues that comprises RNA-protein complexes that have not been characterized in detail may be employed. For examples, in some embodiments an uncharacterized RNA-protein complex associated, e.g., up-regulated, in a diseased tissue or disease state, such as cancer or autoimmune disease, may be used as the screening agent. Examples of RNA-protein binding complexes associated with cancer are described in and Pereira et al., Trend in Cancer 3:506-528, 2017; and references noted below. Examples of autoantibodies to RNA and/or protein components that can be present in RNA-protein binding complexes are described in Moinzadeh et al., Arthritis Res. & Therapy 16:R53, 2014; and Blanco et al., Clin. Exp. Immunol. 86:66-70, 1991).

[0111] In embodiments, in which the RNA-protein complex of interest has not been characterized, binding to the complex target can be evaluated by binding to tissue or cells of interest, optionally with selectivity over binding to an undesired target such as normal tissue or a non-tumor cell line. Once new antibodies are isolated that bind to the desired target, the target complex may be further evaluated to determine components of the RNA-protein complex.

[0112] In some embodiments, an RNA-protein complex may be obtained using an immunoprecipitation reaction or by proximity labeling with biotin for isolation by streptavidin. In some embodiments, recombinant RNA binding proteins may be expressed and reconstituted with RNA, e.g., poly(A+) RNA, ribosomal RNAs, or other RNAs of interest. Illustrative purification methods are provided in Jain et al., Cell 164:487-498, 2016, Hubstenberger et al., Mole. Cell 68:144-157, 2017; Ozgur et al., Cell 13:703-771, 2015; and Blokhuis et al., Acta Neuropathologica 132:175-196, 2016. See, also Urdaneta & Beckmann, Fast and unbiased purification of RNA-protein complexes after UV-cross-linking (Methods 178:72-82, 2020, available at ScienceDirect. The Example section also illustrates gel filtration purification of antibody-RNA/protein complexes.

[0113] In some embodiments, RNA-protein complexes of interest for use as a screening agent may be obtained from a source, e.g., a stress granule, by purifying a stress granule core complex or processing body complex (see, e.g., Jain et al., 2016, supra and Youn et al., Mol. Cell 69:517-532, 2018, referencing Hubstenberger et al., 2017, supra). Additional stress granule related RNA-protein complexes include stress-dependent G3BP1 complex (Markmiller et al., Cell 172, 590-604, 2018). In some embodiments, the RNA-protein complex may be associated with a disease of interest, e.g., ALS disease-associated RNA-protein complex (Blokhuis et al., 2016, supra) and Conlon & Manley, Genes and Develp. 31:1409-1528, 2017. In some embodiments, the RNA-protein complex may be from a condensate (see, e.g., Ditlev et al, J. Mol. Biol. 430:4666-4684, 2018).

[0114] In some embodiments, an RNA-protein complex of interest for use in screening may be a components of a ribonucleoprotein (RNP)-RNA condensate droplet. An RNP-RNA condensate is a large, disordered configuration of denatured RNPs that form non-specific associations with one another and RNA to form a large assemblage that phase-separates to form distinguishable droplets (see, e.g., Hyman et al., Annu Rev. Cell Dev. Biol. 30:39-58, 2014). Biomolecular condensates are two- and three dimensional compartments that concentrate specific collections of distinct molecules without an encapsulating membrane (Ditlev et al., J. Mol. Biol. 430: 4666-4684, 2018; Mullard, Nature Reviews 18:325, 2019). A “stress granule” as used herein refers to a non-membrane bound assembly or granule, typically formed in the cytoplasm, that is increased following cellular stress, such as treatment with an agent that disrupt protein synthesis. An antibody having an altered binding specificity as described herein may also bind to an RNA-protein complex that is a component of an RNP-RNA condensate droplet, a biomolecular condensate, or a stress granule.

[0115] Antibodies that bind RNA-protein complexes can be identified by repeated cycles of panning to identify antibodies that have altered binding specificities compared to the parent antibody template.

### Altered Binding Specificity

[0116] Antibodies as screened and selected in accordance with the disclosure have an altered binding specificity compared to the parent scaffold antibody used as the template for diversification. An “altered binding specificity” refers to binding activity that differs in magnitude and/or target binding compared to the parent antibody. Thus, in some embodiments, an antibody having an altered binding specificity binds to an RNA-protein complex for which the parent binding does not exhibit detectable binding under the screening conditions. In some embodiments, an antibody having an altered binding specificity does not bind to the same protein present in the RNA-protein complex, e.g., as assessed by crosslinking and/or immunoprecipitations analysis. In some embodiments, an antibody having an altered binding specificity exhibits enhanced binding to a target in binding assay compared to the parent antibody assessed in the same binding assay. In some embodiments, an antibody identified in a screen may exhibit reduced binding to the parent antibody target, but also bind an RNA-protein complex not bound by the parent. In some embodiments, an antibody identified in the screen may bind to an RNA-protein complex not bound by the parent while exhibiting similar, enhanced or decreased binding to the RNA-protein complex bound by the parent antibody. In some embodiments, an antibody identified in the screen may exhibit binding to a second RNA-protein complex as well as a third (or more) RNA-protein complex(es) in which activity differs from that of the parent scaffold antibody. In some embodiments, binding analysis may further comprise determining if treatment of an RNA-protein complex with RNase reduces binding of a candidate antibody to a target RNA-protein complex of interest. For example, in some embodiments, a candidate antibody that exhibits reduced binding e.g., at least 3-fold, at least 5-fold, at least 10-fold, at least 100-fold, or at least 1000-fold reduced binding, or no detectable binding, to an RNA-protein complex of interest following treatment with RNase, may be selected.

[0117] In some embodiments, an altered binding specificity is determined by measuring the K_{D} of a candidate antibody selected from a library of diversified sequence prepared from a parent scaffold antibody for binding to a target of interest compared to the K_{D} of the parent scaffold antibody binding to the target of interest under identical conditions. In some embodiments, a determination of altered binding specific may comprise measuring the K_{D} of the parent scaffold antibody for it target compared to that of a candidate antibody for binding to the parent scaffold antibody target. For example, a candidate antibody identified by screening may bind with a K_{D} that differs by at least 3-fold, at least 5-fold, or at least 10-fold, at least 100-fold, at least 1000-fold, or greater, for a target compared to the parent antibody. In some embodiments, a candidate antibody is selected that exhibits a K_{D} for binding to a target of interest that is decreased, i.e., binding is enhanced, compared to the scaffold antibody parent. Thus, for example, in some embodiments, an RNA-protein complex of interest may be generated in vitro by combining RNA and an RNA-binding protein and measuring the K_{D} of a candidate antibody for binding to the target by an assay such as a Biacore assay, compared to K_{D} of the parent scaffold antibody for binding to the target of interest under the same Biacore assay conditions. The K_{D} of a candidate antibody for binding to the target may be further evaluated after treatment of the target with RNase.

[0118] In some embodiments, binding activity to a target of interest, such as tumor tissue, may be assessed by measuring the ability of a candidate antibody to compete for binding to the target tissue in an in vitro competitive binding assay where the ability of the candidate antibody to inhibit binding of a parent scaffold antibody to the target tissue is measure.

[0119] In some embodiments, binding activity to a target of interest, such as a tumor cell target, may be assessed by measuring the ability of a candidate antibody to compete with the parent antibody in an ex vivo EMT6 assay as detailed in the Examples section below. In some embodiments, alternative syngeneic mouse models for the growth of tumor cells can be employed in which the tumor cells are assayed ex vivo, but obtained from tumors generated in syngeneic mouse models. Such models include syngeneic mouse models for cancers such as bladder, colon, glioma, leukemia, lung, melanoma, neuroblastoma, plasmacytoma, prostate, pancreatic, lymphoma, myeloma, liver, kidney, fibrosarcoma. Thus, for example, in some embodiments, a candidate antibody is selected that exhibits a lower EC₅₀ activity in an ex vivo syngeneic mouse model competitive binding assay compared to the parent scaffold antibody.

[0120] In some embodiments, a parent scaffold antibody binds to an extracellular RNA-protein complex that comprises mRNA and further comprises an mRNA binding protein “polyadenylate-binding protein 1” or “poly(A) binding protein 1” (PABP-1) and RNA, e.g., poly(A)-containing RNA. PABP-1 associates with the 3′ poly(A) tail of mRNA and is highly conserved among eukaryotic organisms. PABP-1 is encoded by the poly(A) binding protein cytoplasmic 1 (PABPC1) gene (see, e.g., the human PABPC1 gene sequence available under NCBI Ref. Sequence NM_002568.4). For purposes of the present disclosure, “PABPC1” is used interchangeably with “PABP-1” in referring to the polypeptide. Human PABPC1 polypeptide sequence information is available under UniProtKB accesson number P11940. Two isoforms produced by alternative splicing have been described. Isoform 1 is considered the canonical sequence and is 636 amino acids in length (see, e.g., NCBI Ref. Sequence NP_002559.2). Isoform 2 differs from the canonical sequence in that amino acids 447-553 are missing. A “human PABPC1 polypeptide” as used herein includes any PABPC1 polypeptide encoded by a human PABPC1 gene, which is localized to human chromosome 8q22.2-q23. The RNA-protein complex to which the parent scaffold antibody binds may comprises other RNA binding proteins and RNA other than polyadenylated RNA, for example, the complex may comprises other polyadenylate binding protein family members, such as PABPC4, PABPC3, MOV10, or UPF1. In some embodiments, a candidate antibody binds to an RNA-protein complex that comprises reduced levels of PABPC1 protein, relative to the amount of other RNA binding proteins in the complex, e.g., as measured by immunoprecipitation, compared to the RNA-protein complex bound by the parent scaffold antibody.

### Illustrative Diagnostic/Therapeutic Antibodies

[0121] In a further aspect, a tumor-binding antibody as provided herein, e.g., an antibody having CDRs of antibody AIP-131762, AIP-194564, AIP-169752, AIP-185680, AIP-145328, AIP-182606, AIP-107388, AIP-191692, AIP-163723, AIP-167295, AIP-125646, or AIP-114111 as set forth in Table 3B can be used as an agent for evaluating tumor or as a therapeutic agent, e.g., for the treatment of cancer. In some embodiments, an antibody comprising the V_{H} and V_{L} regions of antibody AIP-131762, AIP-194564, AIP-169752, AIP-185680, AIP-145328, AIP-182606, AIP-107388, AIP-191692, AIP-163723, AIP-167295, AIP-125646, or AIP-114111 set forth in Table 3 Å, or a variant thereof as described herein, is employed as a diagnostic or therapeutic agent.

[0122] In some embodiments, a diagnostic or therapeutic agent, e.g., for the treatment of cancer, comprises:
[0123] a heavy chain variable region comprising an HCDR1 comprising the sequence GFTFSKAWMS (SEQ ID NO: 1), or a variant HCDR1 in which 1, 2, 3, 4, or 5 amino acids are substituted relative to the sequence; an HCDR2 comprising the sequence RIKSVTDGETTDYAAPVKG (SEQ ID NO: 9), or a variant HCDR2 in which 1, 2, 3, 4, or 5 amino acids are substituted relative to the sequence; and an HCDR3 comprising the sequence of an HCDR3 set forth in Table 3B, or a variant HCDR3 in which 1, 2, 3, 4, or 5 amino acids are substituted relative to the sequence; and
[0124] a light chain variable region comprising: an LCDR1 comprising the sequence SGSSSNIGSSSVS (SEQ ID NO: 48), or a variant LCDR1 in which 1, 2, 3, 4, or 5 amino acids are substituted relative to the sequence; an LCDR2 comprising the sequence KNNQRPS (SEQ ID NO: 59), or variant LCDR2 in which 1, 2, or 3 amino acids are substituted relative to the sequence; and an LCDR3 comprising the sequence STWDDSLSVRV (SEQ ID NO: 68), or a variant LCDR3 in which 1, 2, 3, 4, or 5 amino acids are substituted relative to the sequence.
   In some embodiments, the antibody comprises an HCDR3 having a sequence
[0125] TSSFCGGPSHDTSYCGGQYKSYYYMDV (SEQ ID NO: 1734),
[0126] TSSFCCRSGGSCPSHDTSYCGGQYKSYYYMDV (SEQ ID NO: 1735),
[0127] TSSFCCRGGGSCPSHDTSYCGGQYKSYYYMDV (SEQ ID NO: 1730),
[0128] TSSFCCRGGGGSCPSHDTSYCGGQYKSYYYMDV (SEQ ID NO: 1737),
[0129] TSSFCCRGGSGGSCPSHDTSYCGGQYKSYYYMDV (SEQ ID NO: 1738),
[0130] TSSFSCRGGSCPSHDTSYGGQYKSYYYMDV (SEQ ID NO: 1739),
[0131] TSSFCCRGGSCPSHDTSYCGGGQYKSYYYMDV (SEQ ID NO: 1740),
[0132] TSSFCCRGGSCPSHDTSYCGGGSGYKSYYYMDV (SEQ ID NO: 1741),
[0133] TSSFCCRGGSCPSHDTSYCGGQKSYYYMDV (SEQ ID NO: 1742),
[0134] TSSFCCRGGSCPSHDTSYCGGQYSYYYMDV (SEQ ID NO: 1743),
[0135] TSSFCCRGGSCPSHDTSYCGQYKSYYYMDV (SEQ ID NO: 1744), or
[0136] TSSFCCRGGSCPSHDTSYCGGQYKSSYYYMDV (SEQ ID NO: 1745); or a variant thereof having 1, 2, or 3 amino acid substitutions.

[0137] In some embodiments, an antibody used as a therapeutic agent, e.g., for the treatment of cancer, comprises an HCDR1 comprising GFTFSKAWMS (SEQ ID NO: 1), an HCDR2 comprising RIKSVTDGETTDYAAPVKG (SEQ ID NO: 9), an HCDR3 comprising TSSFCCRGGSCPSHDTSYCGQYKSYYYMDV (SEQ ID NO: 1744) or TSSFCCRGGSCPSHDTSYCGGQYKSSYYYMDV (SEQ ID NO: 1745), an LCDR1 comprising SGSSSNIGSSSVS (SEQ ID NO: 48), an LCDR2 comprising KNNQRPS (SEQ ID NO: 59), and an LCDR3 comprising STWDDSLSVRV (SEQ ID NO: 68).

[0138] In some aspects, the disclosure additionally provides methods of identifying subjects who are candidates for treatment with a therapeutic anti-tumor binding antibody. Thus, in one embodiment, the invention provides a method of identifying a patient who has tumor cells that binds to an anti-tumor antibody of the present disclosure. In some embodiments, the tumor sample is from a primary tumor. In alternative embodiments, the tumor sample is a metastatic lesion. Binding of antibody to tumor cells through a binding interaction with an extracellular RNA-protein complex can be measured using any assay, such as immunohistochemistry or flow cytometry. In some embodiments, binding of antibody to at least 0.2%, 0.5%, or 1%, or at least 5% or 10%, or at least 20%, 30%, or 50%, of the tumor cells in a sample may be used as a selection criteria for determining a patient to be treated with an anti-tumor antibody as described herein. In other embodiments, analysis of components of the blood, e.g., circulating exosomes and/or extracellular RNA-protein complex, is used to identify a patient whose tumor cells are generating an extracellular RNA-protein complex.

### EXAMPLES

[0139] An antibody, AIP-192482, was identified that binds an RNA-protein complex target and functions as an anti-tumor agent via an unusual mechanism of tumor regression (see, WO2020/168231). Analysis of variants demonstrates that tolerance to sequence and paratope variation, forming the basis for a scaffold having the structural features identified as described in the following examples.

### Example 1. Acquiring Scaffold Antibody Structures

[0140] A three dimensional structure of an antibody is required for scaffold structure analysis. Although high-resolution experimentally determined structures are preferable, such as those acquired from X-ray crystallography, it is also possible to successfully model highly conserved variant sequences onto another experimentally determined structure of an antibody, i.e., by homology or comparative modeling. A structure of antibody AIP-192482 was obtained via X-ray crystallography. The sequence of AIP-192482 is provided in Tables 1 Å and 4 Å. Insufficient electron density was collected in the region of three consecutive amino acids in the HCDR3 loop (positions 111.7-111.9, IMGT numbering) and the backbone and side chain positions of these residues were not resolved. Computational modeling protocols are employed to repair small regions of missing residues in protein loops. We modeled the region of missing density in our structure using Chemical Computing Group's software Molecular Operating Environment (MOE).

[0141] One technique for comparative modeling utilizes the Rosetta software suite for macromolecular modeling. In one approach, RosettaScripts can be used to apply mutations to an experimentally determined starting structure, and energetically minimize the resulting structure (see, for example, website https doi.org/10.1021/acs.biochem.6b00444). The PackRotamersMover mover in RosettaScripts repacks sidechains and can be directed to substitute sidechains at described positions with another residue, mutating the sequence. The FastRelax mover performs rounds of packing and minimization to find preferred (i.e., low energy) conformations.

[0142] Using the Fv domain from the AIP-192482 structure and RosettaScripts, we modeled nine variants of this sequence. We initially modeled the sequences AIP-122563, AIP-186044, and AIP-160470 (see, Table 4A for sequences) starting with the AIP-192482 structure. Using RosettaScripts, we then performed computational protein design starting with the structure of AIP-160470 to find the optimal sequence via the PackRotamersMover mover. Optionally, the FavorNativeResidue mover can be used to provide a bonus to the starting sequence, requiring that the resulting variant sequence improves upon the initial score. From these designs we selected mutations to create six variants that each mutate one of the CDR loops, described as AIP-145518, AIP-167533, AIP-112580, AIP-150277, AIP-136060, and AIP-154708 (see, Table 4 Å for sequences), and used comparative modeling to generate structures for each as described above. All ten of these antibodies are exemplars of our scaffold structure.

[0143] In the 3-dimensional structures of our scaffold antibodies, we observed two notable features; a pair of disulfide bonds formed in the HCDR3 loop, and a deep pocket formed between the V_{H} and V_{L} domains. While disulfide bonds have been observed before in HCDR3 loops, the overall topology of the HCDR3 loop we observed in our scaffold antibodies has not previously been described. Furthermore, the pocket observed in these scaffold antibodies has not been observed in any other publicly available antibody structure to date.

### Example 2. Analysis of the Scaffold Antibody Pocket

[0144] To model and define the pocket we used the Rosetta application pocket measure, an implementation of LIGSITE [https website doi.org/10.1371/joumal.pcbi.1002951]. In our application of the algorithm, we centered the grid on heavy chain residue 101 (located in HCDR3 and facing into the pocket) and defined a stable grid of 16 Å to encompass the void formed between the VH and VL domains. We used a probe radius of 1.375 Å to model the pocket, and pocket PDBs were generated as output.

[0145] The pocket PDBs were analyzed in PyMOL to calculate pocket depth. The TP and TPB pseudoatoms in this resulting pocket PDB file were used to define the pocket volume. Pocket depth was measured between the bottom-most pseudoatom of the pocket volume and a pseudoatom located centrally at the top of the pocket volume, and center-to-center measurements were corrected by adding twice the probe radius (2.75 Å). The range of pocket depth measurements observed for our ten exemplar scaffold antibody structures (variants of AIP-192482) was 14.25 Å-19.35 Å. The range of pocket depth measurements for our ten exemplar scaffold antibody structures within 2 standard deviations of the mean was 13.70 Å-19.46 Å, and within 3 standard deviations of the mean the range was 12.25 Å-20.91 Å.

[0146] PyMOL was used to analyze the modeled pocket volumes in the context of the scaffold antibody structures, in order to determine residues of the scaffold antibodies that line the pocket. Residues with side chains within 4.0 Å of the pocket volume, measured atom center to pseudoatom center, were flagged as pocket residues. 4.0 Å approximates the longest “weak” hydrogen bond, and is used here to define possible molecule-to-molecule contacts, even if the contact is via hydrophobic atoms. The pocket residue positions conserved in our ten exemplar scaffold antibodies are described in FIGS. 6A and 6B. Pocket residue positions conserved in at least five of our ten exemplar scaffold antibodies are described in FIGS. 7A and 7B.

[0147] FIGS. 8A and 8B show residues observed in 10 exemplar scaffold antibodies at conserved pocket positions of the V_{H} and V_{L} regions; and FIGS. 9A and 9B show residues observed in 10 exemplar scaffold antibodies at majority conserved pocket positions of the V_{H} and V_{L} regions.

[0148] FIGS. 10A and 10B show residues observed in 256 expressed scaffold antibodies at conserved pocket positions of the V_{H} and V_{L} regions; and FIGS. 11A and 11B show residues observed in 256 expressed scaffold antibodies at majority conserved pocket positions of the V_{H} and V_{L} regions.

### Example 3. Evaluation of a AIP-192482 Anti-Tumor Effects

[0149] AIP-192482 was obtained by sequencing a plasmablast from a patient that had non-small cell lung cancer and was evaluated in an in vivo tumor model screen in combination with anti-PD1 antibody therapy.

[0150] An EMT6 syngeneic ectopic breast cancer model in Balb/c mice was employed to evaluate anti-tumor activity of AIP-192482. Mice were randomized into treatment groups based on tumor volume (TV) once tumors reached an average of 75-120 mm³. Treatment with test antibodies and/or checkpoint inhibitor therapy started on the day of randomization. Unless otherwise stated, test antibodies were administered twice weekly for 3.5 weeks (TWx3.5w) by intraperitoneal (i.p.) injection. Pools of four antibodies were tested at doses of 5 mg/kg (mpk) each (20 mg/kg total antibody) by i.p. injection twice weekly for 3.5 weeks (7 doses). Animals were treated in combination with anti-mouse PD1 antibody dosed i.p. at 10 mpk, twice weekly for two weeks. AIP-192482 was also tested alone (outside of pool) at 20 mpk in combination with anti-PD1. The antibody pool containing the lead antibody showed anti-tumor activity (FIG. 12), as did the antibody tested alone in combination with anti-PD1. AIP-19248 also exhibited marked effects on survival at doses of both 5 mpk and 10 mpk (data not shown).

### Example 4. Histological Analysis of AIP-192482 and Variant Binding to Tumor Tissue

[0151] Binding of AIP-192482 and variants (further described below) AIP-160470, AIP-133645, AIP-158623, AIP-155066, AIP-136538, AIP-166120, AIP-187893, AIP-142079, AIP-184490, and AIP-104188 was evaluated in ER-positive breast tumor tissue and TAT. ER-positive breast tumor and TAT sections were stained with H&E and immunostained with the lead antibody, variant, or isotype control (IgG) at 1, 3, and 10 pg/ml. Immunoreactivities were assessed by fluorescent microscopy, and images across concentrations were captured. Positive immunoreactivity (i.e., signal above the IgG control) was detected for AIP-192482 and all of the variants (AIP-160470, AIP-133645, AIP-158623, AIP-155066, AIP-136538, AIP-166120, AIP-187893, AIP-142079, AIP-184490, and AIP-104188) with the exception of AIP-136538 (data not shown). Images were matched for similar fluorescence intensities in the ER-positive breast cancer cores, regardless of antibody concentration. With the exceptions of AIP-136538 and AIP-104188, all variants tested demonstrated fluorescent intensities within breast tumor similar to that observed with the initial lead antibody, but at 3 to 10-fold lower primary antibody concentrations. Selectivity of tumor labeling vs. TAT binding was also assessed. The ratio of tumor to adjacent tissue signal was markedly enhanced vs. lead with a subset of variants including AIP-160470 and AIP-133645.

[0152] AIP-192482 and variants AIP-133645 and AIP-160470 were also evaluated for binding to tumor arising in mice inoculated with either human cancer cell lines (xenografts) or mouse cancer cell lines (syngeneic). Frozen tumors were cryosectioned onto slides. Antibodies and isotype control (IgG) were conjugated to AF647, and slides were incubated with the conjugates then counterstained with Hoechst. An adjacent section was also stained using H&E. Tumor sections stained using the variant antibodies showed enhanced signal compared to the lead for all tumors, including tumors arising from human lung A549 cells, human pancreas BXPC3 cells, human colon cancer Colo-205 cells, or human prostate cancer PC3 cells, and tumors arising from mouse colon, breast, lung, or kidney cancer cell lines (FIG. 13).

[0153] Antibody binding to EMT-6 tumors was also evaluated. Tumor samples were harvested from animals approximately 7 days post-inoculation of 10⁶ EMT-6 cells. EMT-6 binding activity was evaluated for variants AIP-157397, AIP-165430, AIP-160470, AIP-133645, AIP-158623, AIP-155066, AIP-136538, AIP-166120, AIP-187893, AIP-142079, AIP-184490, and AIP-104188 (data not shown). The background immunoreactivity was slightly higher in mouse tissue likely due to interactions with endogenous Fc receptors. While all variants exhibited binding to EMT-6 tumor cells, differential signal intensities were apparent between variants.

### Example 5. Analysis of Binding of Antibody to Target

[0154] To determine the target on tumor cells to which AIP-192482 binds, immunoprecipitation (IP) was performed with whole cell extracts. A549 cells were incubated overnight in methionine- and cysteine-free media supplemented with ³⁵S-labeled methionine and cysteine (37° C., 5% CO₂). Cells were lysed in radio-immunopreciptiation assay (RIPA) buffer (25 mM Tris·HCl pH 7.6, 150 mM NaCl, 1% NP-40, 1% sodium deoxycholate, 0.1% SDS) followed by 5 washes with buffer (1x phosphate buffer saline supplemented with 450 mM NaCl, 1 mM EDTA, 1% NP-40, 5% glycerol). IP reactions using AIP-192482 or control antibody were performed overnight using antibodies cross-linked to Dynabeads™ M-280 Tosylactivated paramagnetic beads. Beads were then collected on magnets and washed in 450 mM NaCl-containing buffer and eluted with 50 mM Tris, pH 8.0, 1 mM EDTA, and 1% sodium deoxycholate. Radiolabelled antigen bound to antibodies was eluted into 2x reducing SDS-PAGE sample buffer and resolved on 4-20% denaturing SDS-PAGE gels. Resolved proteins were visualized by phosphorimaging autoradiography. For analysis by mass spectrometry (MS), lysates were prepared using A549 cells that had not been metabolically labeled and IP reactions scaled up proportionally. Eluates were then evaluated by nanoLC-MS/MS analysis (performed by Alphalyse and MS Bioworks).

[0155] SDS-PAGE analysis identified a large number of unique proteins, ranging in size from 15.8 to 152.8 kDa. Numerous RNA-binding proteins were among the proteins identified by MS analysis. A large number of these identified proteins have been shown to be present in stress granules, see Markmiller et al., Cell, 172, 590-604, Jan. 25, 2018; and Youn et al., Molecular Cell, 69, 517-532 (2018) and Jain et al., Cell 164, 487-498 Jan. 28, 2016. Table 5 lists exemplary proteins identified in the immunoprecipitation complex pulled down by AIP-192482. These identified proteins are categorized based on whether they are also known to be in stress granules according to analyses that have been published previously: i) the biochemical isolation analysis on US-02 cells as described in Jain et al. (2016), ii) the APEX (proximity labeling) analysis performed on HEK293 cells as described in Markmiller et al. (2018), iii) the APEX (proximity labeling) analysis performed on neural progenitor cells as described in Markmiller et al. (2018), and iv) BioID (proximity labeling) analysis on HEK293 cells as described in Youn et al. (2018). Group 1 proteins (12 proteins) are among the list of proteins (20 proteins) that have been previously detected in stress granules by all four published analyses. Group 2 proteins (12 proteins) are among those list of proteins (38 proteins) that have been previously detected in stress granules by three of the four published analyses. Group 3 proteins (20 proteins) are among the list of proteins that have been previously detected in stress granules by two of the four published analyses. Group 4 proteins (63 proteins) are among the list of proteins (139) that have been previously detected in stress granules by Jain et al.

TABLE 5
Exemplary proteins in the immunoprecipitation
complex identified by MS

| Group 1 | Group 2 | Group 3 | Group 4 |
|---|---|---|---|
| TOTAL = | TOTAL = | TOTAL = | TOTAL = |
| 12/20 (60%) | 12/38 (32%) | 20/61 (33%) | 63/139 (45%) |
| ATXN2 | DHX36 | CASC3 | ACIN1 |
| FAM120A | ELAVL1 | CELF1 | ADAR |
| FUBP3 | FMR1 | DDX6 | ATXN2 |
| FXR1 | FXR2 | EDC4 | BAG2 |
| IGF2BP1 | HNRNPA1 | FUS | DDX17 |
| IGF2BP2 | HNRNPAB | GRSF1 | DDX21 |
| IGF2BP3 | PABPC1 | HNRNPA3 | DDX5 |
| PABPC4 | PCBP2 | HNRNPDL | DHX15 |
| STAU2 | PRRC2C | HNRNPH1 | DHX30 |
| SYNCRIP | PUM1 | HNRNPUL1 | DHX9 |
| UPF1 | RBMX | MOV10 | EDC4 |
| YBX3 | ZC3HAV1 | PTBP1 | EFTUD2 |
| | | PTBP3 | EIF4A3 |
| | | RBM4 | ELAVL1 |
| | | SND1 | FAM120A |
| | | SRSF9 | FBL |
| | | TNRC6A | FTSJ3 |
| | | TRIM25 | FUBP3 |
| | | TRIM56 | FUS |
| | | YBX1 | FXR1 |
| | | | HNRNPA0 |
| | | | HNRNPA1 |
| | | | HNRNPA3 |
| | | | HNRNPC |
| | | | HNRNPD |
| | | | HNRNPH1 |
| | | | HNRNPH3 |
| | | | HNRNPL |
| | | | HNRNPR |
| | | | HNRNPUL1 |
| | | | IGF2BP1 |
| | | | IGF2BP2 |
| | | | IGF2BP3 |
| | | | ILF2 |
| | | | ILF3 |
| | | | MATR3 |
| | | | MOV10 |
| | | | NOP56 |
| | | | PABPC1 |
| | | | PABPC4 |
| | | | PCBP2 |
| | | | PLEC |
| | | | PRPF8 |
| | | | PTBP1 |
| | | | RALY |
| | | | RBM14 |
| | | | RBMX |
| | | | RPL14 |
| | | | RPL4 |
| | | | RPS8 |
| | | | RRBP1 |
| | | | SF3B3 |
| | | | SNRNP200 |
| | | | SRRM2 |
| | | | SRSF10 |
| | | | STAU2 |
| | | | SYNCRIP |
| | | | TARDBP |
| | | | TRIM25 |
| | | | TRIM56 |
| | | | UPF1 |
| | | | YBX3 |
| | | | ZC3H7A |

[0156] Additional proteins identified in the MS that were present in AIP-192482 immunoprecipitates at a level of 2-fold or greater, or with a score of 2 or greater, compared to control immunoprecipitates are: ABCF1, ACIN1, ACLY, ADAR, AGO1, AGO2, AGO3, AHNAK, ATP2A2, ATXN2, BAG2, BOP1, BUB3, CAD, CASC3, CDC5L, CELF1, CLTA, CNBP, COPA, CRNKL1, DARS, DDX17, DDX18, DDX21, DDX5, DDX54, DDX6, DHX15, DHX30, DHX36, DHX57, DHX9, DICER1, DKC1, DNTTIP2, EDC4, EEF1D, EEF2, EFTUD2, EIF2AK2, EIF2S1, EIF3D, EIF3E, EIF3I, EIF4A3, EIF4G1, EIF6, ELAVL1, EPRS, FAM120A, FBL, FMR1, FTSJ3, FUBP3, FUS, FXR1, FXR2, GAR1, GEMIN4, GNL3, GRSF1, GTPBP4, HEATR1, HIST1H1B, HIST1H1C, HISTTH3A, HNRNPA0, HNRNPA1, HNRNPA2B1, HNRNPA3, HNRNPAB, HNRNPC, HNRNPD, HNRNPDL, HNRNPF, HNRNPH1, HNRNPH3, HNRNPK, HNRNPL, HNRNPM, HNRNPR, HNRNPUL1, HNRNPUL2, IGF2BP1, IGF2BP2, IGF2BP3, ILF2, ILF3, KARS, KHDRBS1, L1RE1, LARP1, MAGOHB, MAK16, MAP1B, MATR3, MBNL1, MOV10, MRTO4, MVP, MYBBP1A, MYO1B, NAT10, NCL, NHP2, NIFK, NKRF, NOL11, NOL6, NOP2, NOP56, NOP58, PABPC1, PABPC4, PCBP2, PDCD11, PES1, PGD, PLEC, PPP1CB, PRKDC, PRKRA, PRPF19, PRPF4B, PRPF8, PRRC2C, PTBP1, PTBP3, PUM1, PURA, PURB, PWP1, PWP2, RAB14, RAB2A, RACK1, RALY, RAN, RBM14, RBM34, RBM4, RBM45, RBM8A, RBMX, RCC2, RPL10A, RPL11, RPL12, RPL13A, RPL14, RPL15, RPL17, RPL18, RPL18A, RPL19, RPL21, RPL22, RPL23, RPL23A, RPL24, RPL26, RPL27, RPL29, RPL3, RPL30, RPL32, RPL34, RPL35A, RPL36, RPL4, RPL5, RPL6, RPL7, RPL7A, RPL8, RPLP0, RPLP1, RPLP2, RPS11, RPS13, RPS17, RPS23, RPS24, RPS26, RPS27A, RPS3, RPS3A, RPS5, RPS6, RPS8, RPS9, RPSA, RRBP1, RRP1, RRP9, RRS1, RSL1D1, RTCB, RUVBL2, RYDEN, SART3, SF3B3, SKIV2L2, SLC3A2, SND1, SNRNP200, SNRNP70, SNRPB, SNRPD1, SNRPD2, SNRPD3, SON, SRP68, SRP72, SRPK1, SRPK2, SRRM2, SRSF1, SRSF10, SRSF2, SRSF3, SRSF6, SRSF7, SRSF9, SSB, STAU1, STAU2, STRAP, SYNCRIP, TARBP2, TARDBP, TCOF1, TCP1, THOC2, THOC6, TNRC6A, TOP1, TRA2A, TRA2B, TRIM25, TRIM56, TTN, U2AF2, UGDH, UPF1, UTP15, UTP18, UTP4, UTP6, WDR12, WDR36, WDR43, WDR46, WDR74, WDR75, XAB2, XRCC5, XRN2, YBX1, YBX3, YTHDC2, ZC3H7A, ZC3HAV1, ZCCHC3, and ZNF326.

[0157] To test whether RNA is part of a complex to which AIP-192482 binds, lysates were prepared from radiolabelled A549 cells and then treated with increasing amounts of RNase A (from 0.001 to 10 μg/ml) or DNAse 1(20 μg/ml). Treated lysates were employed in IP using AIP-192482. Bound proteins were analyzed by SDS-PAGE followed by autoradiography. Results showed that treatment with RNase, but not DNase, eliminated proteins immunoprecipitated by AIP-192482 in an RNase dose-dependent fashion (FIG. 14). This effect was specific to the AIP-192482 antigen since no such effect was observed for EGFR binding to an anti-EGFR control antibody (data not shown). This result indicated that RNA contributes to AIP-192482 binding to its target.

[0158] Additional MS analysis was performed to identify the composition of the target. IN one such analysis, RIPA lysate prepared from unlabelled A549 cells was incubated with AIP-192482-conjugated M-280 beads and then crosslinked using DTSSP (ThermoFisher). After quenching, lysates were treated with RNase (100 ng/ml). Beads were washed in high salt buffer and antigen eluted using 0.5 N ammonium hydroxide before performing nanoLC-MS/MS (MS Bioworks). In gel digestion was performed and proteins analyzed. One RNA binding protein, PABPC1, was present in high abundance in results from all MS runs and was enriched following RNase treatment (FIG. 15).

[0159] PABPC1 was expressed as a C-terminal FLAG fusion in 293T cells transiently transfected with a human PABPC1-FLAG expression plasmid and purified by anti-FLAG antibody chromatography. Purified PABPC1 was incubated with purified poly(A) RNA (56mer) produced via in vitro transcription of a linearized plasmid template driven by a T7 promoter. Complexed PABPC1-RNA was then incubated with monovalent AIP-192482 Fab and resulting complexes resolved on a Superose 6 gel filtration column (GE Lifesciences) at a final ratio of 15:15:1 PABPC1: AIP-192482 Fab: RNA by mass. A₂₈₀ absorbance of column eluate and SDS-PAGE analysis of column fractions (FIG. 16) indicated that AIP-192482 Fab, PABPC1 and poly(A) RNA form a high molecular size complex that elutes from the column markedly before the individual components. RNase A was also included in an AIP-192482 incubation step prior to column chromatography. A high molecular size complex was not observed for this sample.

[0160] As explained above, MS results from crosslinked, RNAse treated immunoprecipitate from A549 cells obtained using AIP-192482 showed the presence of PABPC1 in the immunoprecipitate. PABPC3/4, MOV10, UPF1, and other proteins were also identified as components present in the immunoprecipitate.

### Example 6. Confocal Imaging Showing Localization and Components of the Complexes Targeted by the Antibodies

[0161] Immunofluorescence microscopy was performed on EMT6 tumor tissues stained with antibodies. AIP-192482 was shown to co-localize with a subpopulation of G3BP-positive structures within the EMT6 tumors (data not shown). The images showed an extensive overlap between AIP-192482 signal and signal for G3BP, another marker of stress granules. The results show a presence of smaller G3BP puncta that are not positive for AIP-192482. Although a subset of these G3BP-positive structures, i.e., very small puncta, are not positive for AIP-192482 immunoreactivity, in larger aggregates, which are more heterogeneous in structure, the reactivity co-locates. This suggests that AIP-192482 associates with complexes with RNPs.

[0162] The antibodies disclosed herein were shown to target protein complexes located extracellularly via confocal microscopy. AIP-160470 reacted where CD9 reactivity was also detected. The confocal imaging showed that the AIP-160470 reactivity was clearly extracellular in nature, which corroborates the flow cytometry data as described below. Similar confocal microscopy experiments were performed with human breast carcinoma tissue, which also showed that AIP-160470 co-localized with numerous CD9-positive vesicles about 1 μm diameter that appeared extracellular.

[0163] Additional confocal microscopy imaging showed that AIP-160470 signal co-located with RNA binding proteins, including PABPC1 and MOV10, and labeling was consistent with extracellular punctae and plasma membrane in human ovarian cancer tissue.

### Example 7. Flow Cytometry Showing the Surface Localization of the Complexes Targeted by the Antibodies

[0164] EMT6 cells were treated with a chemotherapeutic agent, doxorubicin (“DOX”) or cisplatin (“CDDP”), for 16 hours. Both DOX and CDDP are known inducers of stress granules, Vilas-Boas, et al., J Neurooncol 127:253-260 (2016); and Morita et al., Biochemical and Biophysical Research Communications 417: 399-403 (2012). The treated cells were plated in a 96 well plate and stained with AIP-192482, AIP-160470, or AIP-195694 (negative control). The cells were then stained with a secondary antibody that was conjugated with Alexa 647 and analyzed on a flow cytometer. Geometric mean fluorescence corresponding to the binding of antibodies to the EMT6 cells were plotted against concentrations of the chemotherapeutic agents used in treating cells (data not shown). These data showed that these antibodies were bound to the surface of the cells, which complement the confocal data, which shows growth of EMT6 cells in vivo also induces such surface reactivity.

### Example 8. Generation of Variants of AIP-192482 and AIP-160470

[0165] Antibody variants of AIP-192482 and AIP-160470 were generated by introducing various substitutions into the CDRs, using AIP-160470 as a parental comparison sequence. The variants included individual substitutions introduced across each CDR, as well as variants in which up to four substitutions were introduced into HCDR1, up to five substitutions were introduced into HCDR2, up to thirteen substitutions were introduced into HCDR3, up to six substitutions were introduced into LCDR1, up to three substitutions were introduced into LCDR2, and up to six substitutions were introduced into LCDR3. Combinations of variant CDR1, CDR2, and CDR3 sequences were also tested. The CDR sequences of active variants are provided in Table 1B and Table 2B.

[0166] Variants of AIP-160470 comprising deletions or insertion in the HCDR3 were also generated. Sequences are provide in Table 3 Å.

[0167] Activity of antibodies in vitro was determined using an FcR engagement assay to assess activity in comparison to that of AIP-160470. Variants were tested in a FcγRIIa-H ADCP Reporter Bioassay (Promega). This assay is used to measure the potency and stability of antibodies that specifically bind and activate FcγRIIa. The assay employed Jurkat cells stably expressing human FcγRIIa-H (the high-affinity H131 variant) and NFAT-induced luciferase. Following engagement of an FcγR on Jurkat effector cells by the Fe region of a test antibody binding to a target cell, intracellular signals are generated in the Jurkat cells that result in NFAT-RE-mediated luciferase activity, which can be quantified.

[0168] The activity of substitution variants active in the in vitro assay are shown in FIG. 17. Variants are deemed active if they exhibited an EC₅₀ of 500 nM or less; or if they have a delta activity value, relative to AIP-160470, of at least 0.5. An antibody that has a delta-value, relative to AP-160470, of zero is considered to be inactive.

[0169] The activity of variants comprising deletions or insertions in the HCDR3 of AIP-160470 were also assed in the in vitro assay. The HCDR3 sequences are provided in Table 3B. The values are shown below. The number following the AIP number reflects number of times the antibody was assayed.

| | | | Avg | Avg |
|---|---|---|---|---|
| AIP Number | EC50 | Fold | EC50 | ΔActivity |
| (N) | (nM) | ΔActivity | Rank | Rank |
| AIP-131762 (1) | >500 | 0.28 | 0.0 | 1.0 |
| AIP-194564 (2) | 472 | 0.58 | 1.0 | 2.0 |
| AIP-169752 (1) | >500 | 0.57 | 0.0 | 2.0 |
| AIP-185680 (1) | >500 | 0.29 | 0.0 | 1.0 |
| AIP-145328 (1) | >500 | 0.32 | 0.0 | 2.0 |
| AIP-182606 (1) | >500 | 0.46 | 0.0 | 2.0 |
| AIP-107388 (1) | >500 | 0.65 | 0.0 | 2.0 |
| AIP-191692 (1) | >500 | 0.39 | 0.0 | 2.0 |
| AIP-163723 (1) | >500 | 0.49 | 0.0 | 2.0 |
| AIP-16729 5(1) | >500 | 0.36 | 0.0 | 2.0 |
| AIP-125646 (2) | 446 | 0.75 | 1.0 | 2.5 |
| AIP-114111 (2) | 258 | 0.55 | 1.5 | 2.0 |

### Example 9. Ex Vivo Binding Assay Correlates with In Vivo Anti-Tumor Activity

[0170] A subset of variant antibodies was evaluated to analyzed in an ex vivo binding assay to determine correlation with in vivo anti-tumor activity. Mice were injected with EMT6 tumor cells and the tumor allowed to grow to a size of about 500-600 mm³. Tumors were harvested, digested, and antibody binding to the surface of live tumor cells analyzed by flow cytometry. Binding was correlated with normalized area above the curve (NAAC) values representing tumor volume following in vivo treatment with antibody. The results showed that binding of antibodies to the ex vivo EMT6 cells largely correlated with in vivo outcome (FIGS. 18 and 19). Ex vivo flow analysis thus provides a screening assay that largely correlates with in vivo function.

[0171] Antibodies that are active in vivo are listed in Tables 1 Å and 1B. Antibodies that are active in the in vitro assay are listed in Table 2 Å and 2B; and Table 3 Å and 3B. AIP-125646 and AIP-114111 were also active in vivo.

[0172] The in vivo activity of AIP-125646 and AIP-114111 was also assessed in the EMT6 mouse model. The log-rank p-value for AIP-125646 was 2.37E-05 and that of AIP-114111 was 1.75E-04.

| | NAAC | NAAC | NAAC | NGRM | NGRM |
|---|---|---|---|---|---|
| AIP No. | n | p-value | effect size | p-value | effect size |
| AIP-125646 | 10 | 2.25E−06 | 0.3698 | 1.75E−04 | 0.2757 |
| AIP-114111 | 10 | 7.80E−05 | 0.3493 | 5.33E−06 | 0.1057 |

### Methodology for Assessing In Vivo Activity

[0173] Anti-tumor activity of antibodies was assessed using an EMT6 syngeneic mouse tumor model was used as described above (see, WO2020/168231 for details of the protocol employed) to assess the anti-tumor efficacy of mIgG2a antibodies. The procedure utilized was modified from DeFalco et al., Clin. Immunol. 187:37-45, 2018. EMT6 mouse tumor cells were propagated in culture by passaging cells every 2 to 3 days (1:10 subcultures). In brief, female 4-6-week old BALB/c mice were each inoculated in the right hind flank by subcutaneous injection with 1×10⁶ EMT6 cells in 0.2 mL Waymouth's media without supplements. The day of cell inoculation was designated as Study Day 0. An overage of >30% was included to achieve study groups with consistent and homogenous tumor volumes. Mouse tumors consistently became visible and palpable approximately three days after cell inoculation. Tumor volumes were measured 2-3 times prior to randomization. Mice were randomized on study day 7 using the ‘matched distribution’ randomization function of the StudyLog lab animal management software (version 3.1.399.23) to ensure homogenous tumor volumes. Test articles and vehicle control were prepared in formulation buffer (Dulbecco's PBS, DPBS). Starting on randomization day, test articles were dosed at 10 ml/kg based on mouse body weight via twice weekly IP injection for a total of 7 doses. All mice were dosed as scheduled or until they were removed from study based on euthanasia criteria. Tumor volumes were measured twice weekly after randomization. Tumor volumes were calculated automatically using the following equation:

Tumor Volume (mm³)=length (mm)×width² (mm)×0.5

[0174] Following test article administration, mice with tumor volumes of 0 mm³ for three consecutive measurements were considered to show a complete response (CR). Mice with consistent tumor regression that continued after closure of the dosing window were considered to show a durable response (DR).

[0175] Statistical analyses of tumor volumes were performed using the normalized area above the curve (NAAC) and the normalized growth rate metric (NGRM) developed at Atreca, Inc.

[0176] To determine the NAAC, the area between the tumor volume curve and the tumor volume endpoint of 2000 mm³ was divided by the total area possible through Study Day 35 post tumor inoculation. The total area possible is determined between the first time point at which all animals have a measurable tumor volume and Study Day 35 for tumor volumes between 0 mm³ to 2000 mm³. NAAC values are between 0 and 1. Individuals with a small area between the curve and the tumor volume endpoint have NAAC values closer to 0, and individuals with a larger area between the curve and the tumor volume endpoint have NAAC values closer to 1.

[0177] To determine the NGRM, the slope was first calculated for the log-transformed tumor volumes versus time, and then rescaled to 20 days post tumor inoculation. These slopes were then normalized to values between 0 and 1. Individuals with an increasing tumor volume over time have NGRM values closer to 0, and individuals with a stable or decreasing tumor volume over time have NGRM values closer to 1.

[0178] Statistically significant differences between the distributions for the treatment and control group were evaluated for NAAC and NGRM with a one-sided Wilcoxon rank-sum test, yielding a p-value using R version 3.4.3 (The R Foundation). Animals with final tumor volumes that did not reach 1800 mm³ and did not survive through 80% of the duration of the analysis were excluded from the analysis of NAAC and NGRM.

[0179] It is understood that the examples and embodiments described herein are for illustrative purposes only and that various modifications or changes in light thereof will be suggested to persons skilled in the art and are to be included within the spirit and purview of this application and scope of the appended claims. All publications, patents, accession numbers, and patent applications cited herein are hereby incorporated by reference for the purposes in the context of which they are cited.

TABLE 1A

| | AIP | | |
|---|---|---|---|
| | Number | V_{H} Sequence | V_{L} Sequence |
| 1 | AIP- | EVQLVESGGALVKPGGSLRLSCAASGFTFSKAWMS | QSVLTQPPSASGTPGQRVTISCSGSSSNIGSSSVSWYQQLPG |
| | 101235 | WVRQAPGKGLEWVGRIKSVTDGETTDYAAPVKGRF | TAPKLLIYKNNQRPSGVPDRFSGSKSGTSASLAISGLRSEDE |
| | | TISRDDSKSTLYLQMNSLKTEDTAVYYCTSSFCCR | ADYYCSTWDDSLSVRVFGGGTKLTVL (SEQ ID NO: 123) |
| | | SGSCPSSDTSYCNGQYKSYYYMDVWGKGTTVTVSS | |
| | | (SEQ ID NO: 77) | |
| 2 | AIP- | EVQLVESGGGLVQPGGSLRLSCAASGFTFSKAWMS | QSVLTQPPSVSAAPGQKVTISCSGSSSNIGSSSVSWYQQLPG |
| | 127782 | WVRQAPGKGLEWVGRIKSVTDGETTEYAASVKGRF | TAPKLLIYKNNQRPSGIPDRFSGSKSGTSATLGITGLQTGDE |
| | | TISRDDSKNSLYLQMNSLKTEDTAVYYCTSSFCCR | ADYYCSTWDDSLSVRVFGGGTKLTVL (SEQ ID NO: 124) |
| | | GGSCPSHDTSYCGGQYKSYYYMDVWGKGTTVTVSS | |
| | | (SEQ ID NO: 78) | |
| 3 | AIP- | EVQLVESGGALVKPGGSLRLSCAASGFTFSKAWMS | QSVLTQPPSASGTPGQRVTISCSGSSSNIGSSSVSWYQQLPG |
| | 189473 | WVRQAPGKGLEWVGRIKSVTDGETTDYAAPVKGRF | TAPKLLIYKNNQRPSGVPDRFSGSKSGTSASLAISGLRSEDE |
| | | TISRDDSKSTLYLQMNSLKTEDTAVYYCTTSFCCR | ADYYCSTWDDSLSVRVFGGGTKLTVL (SEQ ID NO: 125) |
| | | GASCPSSDTSYCAGSYKSYYFVNIWGKGTTVTVSS | |
| | | (SEQ ID NO: 79) | |
| 4 | AIP- | EVQLVESGGALVKPGGSLRLSCAASGFTFSKAWMS | QSVLTQPPSASGTPGQRVTISCSGSSSNIGSSSVSWYQQLPG |
| | 192571 | WVRQAPGKGLEWVGRIKSVTDGETTDYAAPVKGRF | TAPKLLIYKNNQRPSGVPDRFSGSKSGTSASLAISGLRSEDE |
| | | TISRDDSKSTLYLQMNSLKTEDTAVYYCTSSFCCR | ADYYCSTWDDSLSVRVFGGGTKLTVL (SEQ ID NO: 126) |
| | | GNQCPSSDTSYCGGQYPSYYYMDPWGKGTTVTVSS | |
| | | (SEQ ID NO: 80) | |
| 5 | AIP- | EVQLVESGGALVKPGGSLRLSCAASGFTFSKAWMS | QSVLTQPPSASGTPGQRVTISCSGSSSNIGSSSVSWYQQLPG |
| | 125258 | WVRQAPGKGLEWVGRIKSVTDGETTDYAAPVKGRF | TAPKLLIYKNNQRPSGVPDRFSGSKSGTSASLAISGLRSEDE |
| | | TISRDDSKSTLYLQMNSLKTEDTAVYYCISSFCCR | ADYYCSTWDDSLSVRVFGGGTKLTVL (SEQ ID NO: 127) |
| | | GKQCPSSDTSYCNGYYADYYFMDVWGKGTTVTVSS | |
| | | (SEQ ID NO: 81) | |
| 6 | AIP- | EVQLVESGGALVKPGGSLRLSCAASGFTFSKAWMS | QSVLTQPPSASGTPGQRVTISCSGSSSNIGSSSVSWYQQLPG |
| | 150199 | WVRQAPGKGLEWVGRIKSVTDGETTDYAAPVKGRF | TAPKLLIYKNNQRPSGVPDRFSGSKSGTSASLAISGLRSEDE |
| | | TISRDDSKSTLYLQMNSLKTEDTAVYYCISSFCCR | ADYYCSTWDDSLSVRVFGGGTKLTVL (SEQ ID NO: 128) |
| | | GKQCPSSDTSYCGGQFKSYYFMDVWGKGTTVTVSS | |
| | | (SEQ ID NO: 82) | |
| 7 | AIP- | EVQLVESGGALVKPGGSLRLSCAASGFTFSKAWMS | QSVLTQPPSASGTPGQRVTISCSGSSSNIGSSSVSWYQQLPG |
| | 115388 | WVRQAPGKGLEWVGRIKSVTDGETTDYAAPVKGRF | TAPKLLIYKNNQRPSGVPDRFSGSKSGTSASLAISGLRSEDE |
| | | TISRDDSKSTLYLQMNSLKTEDTAVYYCISSFCCH | ADYYCSTWDDSLSVRVFGGGTKLTVL (SEQ ID NO: 129) |
| | | SNNCPSSDTSYCNGYYKQYYFMDVWGKGTTVTVSS | |
| | | (SEQ ID NO: 83) | |
| 8 | AIP- | EVQLVESGGALVKPGGSLRLSCAASGFTYSAAWMS | QSVLTQPPSASGTPGQRVTISCSGSSTNIGSSSVTWYQQLPG |
| | 143369 | WVRQAPGKGLEWVGRIKAVHDGETTDYAAPVKGRF | TAPKLLIYKDNQRPLGVPDRFSGSKSGTSASLAISGLRSEDE |
| | | TISRDDSKSTLYLQMNSLKTEDTAVYYCTSSFCCR | ADYYCSTWDDSLSVRVFGGGTKLTVL (SEQ ID NO: 130) |
| | | GGSCPSHDTSYCGGQYKSYYYMDVWGKGTTVTVSS | |
| | | (SEQ ID NO: 84) | |
| 9 | AIP- | EVQLVESGGALVKPGGSLRLSCAASGFTFSMAWMS | QSVLTQPPSASGTPGQRVTISCSGSKSNIGSSYVSWYQQLPG |
| | 157045 | WVRQAPGKGLEWVGRIKSNTDAETTDYAAPVKGRF | TAPKLLIYMNNQRPYGVPDRFSGSKSGTSASLAISGLRSEDE |
| | | TISRDDSKSTLYLQMNSLKTEDTAVYYCTSSFCCR | ADYYCATWDDQLSVRVFGGGTKLTVL (SEQ ID NO: 131) |
| | | GGSCPSHDTSYCGGQYKSYYYMDVWGKGTTVTVSS | |
| | | (SEQ ID NO: 85) | |
| 10 | AIP- | EVQLVESGGALVKPGGSLRLSCAASGFTFSAAWMS | QSVLTQPPSASGTPGQRVTISCSGSKSNIGSSSVSWYQQLPG |
| | 175775 | WVRQAPGKGLEWVGRIKSVTDGETTDYAAPVKGRF | TAPKLLIYKDNQRPSGVPDRFSGSKSGTSASLAISGLRSEDE |
| | | TISRDDSKSTLYLQMNSLKTEDTAVYYCISSFCCR | ADYYCATWDNSLSIRVFGGGTKLTVL (SEQ ID NO: 132) |
| | | GNSCPSSDTSYCNGQYKSYYYMDVWGKGTTVTVSS | |
| | | (SEQ ID NO: 86) | |
| 11 | AIP- | EVQLVESGGALVKPGGSLRLSCAASGFTYSKAWMS | QSVLTQPPSASGTPGQRVTISCSGASSNIGSSSVSWYQQLPG |
| | 154181 | WVRQAPGKGLEWVGRIKSVQDGETTDYAAPVKGRF | TAPKLLIYKNTQRASGVPDRFSGSKSGTSASLAISGLRSEDE |
| | | TISRDDSKSTLYLQMNSLKTEDTAVYYCTSSFCCR | ADYYCSSWDDSNSVRIFGGGTKLTVL (SEQ ID NO: 133) |
| | | GGSCPSHDTSYCGGQYKSFYYMDVWGKGTTVTVSS | |
| | | (SEQ ID NO: 87) | |
| 12 | AIP- | EVQLVESGGALVKPGGSLRLSCAASGFTFAKAWMS | QSVLTQPPSASGTPGQRVTISCSGSSTNIGSSTVSWYQQLPG |
| | 125984 | WVRQAPGKGLEWVGRIKSVTDGHTTDYAAPVKGRF | TAPKLLIYKNNARPYGVPDRFSGSKSGTSASLAISGLRSEDE |
| | | TISRDDSKSTLYLQMNSLKTEDTAVYYCTSSFCCR | ADYYCATWDDSLTVRIFGGGTKLTVL (SEQ ID NO: 134) |
| | | GGSCPSHDTSYCGGQYKSYYYMDVWGKGTTVTVSS | |
| | | (SEQ ID NO: 88) | |
| 13 | AIP- | EVQLVESGGALVKPGGSLRLSCAASGFVFSKAWMS | QSVLTQPPSASGTPGQRVTISCSGASSNIGSSSVSWYQQLPG |
| | 160829 | WVRQAPGKGLEWVGRIKSVTDGGITDYAAPVKGRF | TAPKLLIYKNTQRPSGVPDRFSGSKSGTSASLAISGLRSEDE |
| | | TISRDDSKSTLYLQMNSLKTEDTAVYYCISSFCCR | ADYYCATWDDQLSVRVFGGGTKLTVL (SEQ ID NO: 135) |
| | | GNSCPSSDTSYCNGQYKSYYFMDVWGKGTTVTVSS | |
| | | (SEQ ID NO: 89) | |
| 14 | AIP- | EVQLVESGGALVKPGGSLRLSCAASGFTFSAAWMS | QSVLTQPPSASGTPGQRVTISCSGSSTNIGSSSVSWYQQLPG |
| | 184744 | WVRQAPGKGLEWVGRIKSTSDGETTDYAAPVKGRF | TAPKLLIYKDNQRPSGVPDRFSGSKSGTSASLAISGLRSEDE |
| | | TISRDDSKSTLYLQMNSLKTEDTAVYYCISSFCCR | ADYYCSSWDDSNSVRIFGGGTKLTVL (SEQ ID NO: 136) |
| | | GGSCPSRDTSYCGGQYKSYYFMDVWGKGTTVTVSS | |
| | | (SEQ ID NO: 90) | |
| 15 | AIP- | EVQLVESGGALVKPGGSLRLSCAASGFTFSKAWMS | QSVLTQPPSASGTPGQRVTISCSGSKSNIGSSSVYWYQQLPG |
| | 128136 | WVRQAPGKGLEWVGRIKSVQDGETTDYAAPVKGRF | TAPKLLIYKNNQRPYGVPDRFSGSKSGTSASLAISGLRSEDE |
| | | TISRDDSKSTLYLQMNSLKTEDTAVYYCTSSFCCR | ADYYCSTWDDALSVRVFGGGTKLTVL (SEQ ID NO: 137) |
| | | GGSCPSSDTSYCGGYYKSYYFMDVWGKGTTVTVSS | |
| | | (SEQ ID NO: 91) | |
| 16 | AIP- | EVQLVESGGALVKPGGSLRLSCAASGFTFSKAWMS | QSVLTQPPSASGTPGQRVTISCSGSSSNIGSSSVYWYQQLPG |
| | 181273 | WVRQAPGKGLEWVGRIKSVTDGETTDYAAPVKGRF | TAPKLLIYKNNQRPSGVPDRFSGSKSGTSASLAISGLRSEDE |
| | | TISRDDSKSTLYLQMNSLKTEDTAVYYCTSSFCCR | ADYYCSTWDDALSVRVFGGGTKLTVL (SEQ ID NO: 138) |
| | | GGSCPSSDTSYCGGQYKSYYFMDVWGKGTTVTVSS | |
| | | (SEQ ID NO: 92) | |
| 17 | AIP- | EVQLVESGGALVKPGGSLRLSCAASGFTFSKAWMS | QSVLTQPPSASGTPGQRVTISCSGSKSNIGSSYVSWYQQLPG |
| | 153125 | WVRQAPGKGLEWVGRIKSVQDGETTDYAAPVKGRF | TAPKLLIYKNNQRPYGVPDRFSGSKSGTSASLAISGLRSEDE |
| | | TISRDDSKSTLYLQMNSLKTEDTAVYYCTSSFCCR | ADYYCSTWDDSLSVRVFGGGTKLTVL (SEQ ID NO: 139) |
| | | GGSCPSHDTSYCGGYYKSYYYMDVWGKGTTVTVSS | |
| | | (SEQ ID NO: 93) | |
| 18 | AIP- | EVQLVESGGALVKPGGSLRLSCAASGFTFSKAWMS | QSVLTQPPSASGTPGQRVTISCSGSSSNIGSSSVSWYQQLPG |
| | 160470 | WVRQAPGKGLEWVGRIKSVTDGETTDYAAPVKGRF | TAPKLLIYKNNQRPSGVPDRFSGSKSGTSASLAISGLRSEDE |
| | | TISRDDSKSTLYLQMNSLKTEDTAVYYCTSSFCCR | ADYYCSTWDDSLSVRVFGGGTKLTVL (SEQ ID NO: 140) |
| | | GGSCPSHDTSYCGGQYKSYYYMDVWGKGTTVTVSS | |
| | | (SEQ ID NO: 94) | |
| 19 | AIP- | EVQLVESGGALVKPGGSLRLSCAASGFTFSKAWMT | QSVLTQAPSASETPGQRVIISCSGSSSNIGSSSVSWYQQLPG |
| | 192482 | WVRQAPGKGLEWVGRIKSVTDGETTDYAAPVKGRF | TAPKLLIYKNNQRPSGVPDRFSGSKSGTSASLAISGLRSEDE |
| | | TISRDDSKSVLYLQMSSLKTEDTAVYFCTSSFCCR | ADYYCSTWDDSLSVRVFGGGTKLTVL (SEQ ID NO: 141) |
| | | GGSCPSHDTSFCGGQDKRYYYMDVWGKGTTVTVSS | |
| | | (SEQ ID NO: 95) | |
| 20 | AIP- | EVQLVESGGGLVKPGGSLRLSCAASGFTFSKAWMT | QSVLTQPPSASGTPGQRVTISCSGSSSNIGSSSVSWYQQLPG |
| | 171142 | WVRQAPGKGLEWVGRIKSVTDGETTDYAAPVKGRF | TAPKLLIYKNNQRPSGVPDRFSGSKSGTSASLAISGLRSEDE |
| | | TISRDDSKNTLYLQMNSLKTEDTAVYYCTTSFCCR | ADYYCSTWDDSLSVRVFGGGTKLTVL (SEQ ID NO: 142) |
| | | GGSCPSHDTSFCGGQDKRYYYMDVWGQGTTVTVSS | |
| | | (SEQ ID NO: 96) | |
| 21 | AIP- | EVQLVESGGALVKPGGSLRLSCAASGFTFSKAWMT | QSVLTQAPSASETPGQRVIISCSGSSSNIGSSSVSWYQQLPG |
| | 157397 | WVRQAPGKGLEWVGRIKSVTDGETTDYAAPVKGRF | TAPKLLIYKNNQRPSGVPDRFSGSKSGTSASLAISGLRSEDE |
| | | TISRDDSKSVLYLQMSSLKTEDTAVYFCTSSFCCR | ADYYCSTWDDSLSVRVFGGGTKLTVL (SEQ ID NO: 143) |
| | | GGSCPSHDTSFCGGQYNRYYYMDVWGKGTTVTVSS | |
| | | (SEQ ID NO: 97) | |
| 22 | AIP- | EVQLVESGGALVKPGGSLRLSCAASGFTFSKAWMT | QSVLTQAPSASETPGQRVIISCSGSSSNIGSSSVSWYQQLPG |
| | 165430 | WVRQAPGKGLEWVGRIKSVTDGETTDYAAPVKGRF | TAPKLLIYKNNQRPSGVPDRFSGSKSGTSASLAISGLRSEDE |
| | | TISRDDSKSVLYLQMSSLKTEDTAVYFCTSSFCCR | ADYYCSTWDDSLSVRVFGGGTKLTVL (SEQ ID NO: 144) |
| | | GGSCPSHDTSFCGGQYKSYYYMDVWGKGTTVTVSS | |
| | | (SEQ ID NO: 98) | |
| 23 | AIP- | EVQLVESGGGLVKPGGSLRLSCAASGFTFSKAWMT | QSVLTQPPSASGTPGQRVTISCSGSSSNIGSSSVSWYQQLPG |
| | 189526 | WVRQAPGKGLEWVGRIKSTSDGGITDYAAPVKGRF | TAPKLLIYKNNQRPSGVPDRFSGSKSGTSASLAISGLRSEDE |
| | | TISRDDSKNTLYLQMNSLKTEDTAVYYCTTSFCCR | ADYYCSTWDDSLSVRVFGGGTKLTVL (SEQ ID NO: 145) |
| | | GGRCPSRDTSFCGGQYNSYYYMDVWGQGTTVTVSS | |
| | | (SEQ ID NO: 99) | |
| 24 | AIP- | EVQLVESGGALVKPGGSLRLSCAASGFTFSKAWMT | QSVLTQPPSASGTPGQRVTISCSGSSSNIGSSSVSWYQQLPG |
| | 122563 | WVRQAPGKGLEWVGRIKSVTDGETTDYAAPVKGRF | TAPKLLIYKNNQRPSGVPDRFSGSKSGTSASLAISGLRSEDE |
| | | TISRDDSKSTLYLQMNSLKTEDTAVYYCTSSFCCR | ADYYCSTWDDSLSVRVFGGGTKLTVL (SEQ ID NO: 146) |
| | | GGSCPSHDTSFCGGQDKRYYYMDVWGKGTTVTVSS | |
| | | (SEQ ID NO: 100) | |
| 25 | AIP- | EVQLVESGGALVKPGGSLRLSCAASGFTFSKAWMT | QSVLTQPPSASGTPGQRVTISCSGSSSNIGSSSVSWYQQLPG |
| | 158623 | WVRQAPGKGLEWVGRIKSVTDGETTDYAAPVKGRF | TAPKLLIYKNNQRPSGVPDRFSGSKSGTSASLAISGLRSEDE |
| | | TISRDDSKSTLYLQMNSLKTEDTAVYYCTSSFCCR | ADYYCSTWDDSLSVRVFGGGTKLTVL (SEQ ID NO: 147) |
| | | GGSCPSHDTSFCGGQYKSYYYMDVWGKGTTVTVSS | |
| | | (SEQ ID NO: 101) | |
| 26 | AIP- | EVQLVESGGGLVKPGGSLRLSCAASGFTFSKAWMT | QSVLTQPPSASGTPGQRVTISCSGSSSNIGSSSVSWYQQLPG |
| | 155066 | WVRQAPGKGLEWVGRIKSVTDGETTDYAAPVKGRF | TAPKLLIYKNNQRPSGVPDRFSGSKSGTSASLAISGLRSEDE |
| | | TISRDDSKNTLYLQMNSLKTEDTAVYYCTTSFCCR | ADYYCSTWDDSLSVRVFGGGTKLTVL (SEQ ID NO: 148) |
| | | GGSCPSHDTSFCGGQYKSYYYMDVWGQGTTVTVSS | |
| | | (SEQ ID NO: 102) | |
| 27 | AIP- | EVQLVESGGALVKPGGSLRLSCAASGFTFSKAWMT | QSVLTQPPSASGTPGQRVTISCSGSSSNIGSSSVSWYQQLPG |
| | 136538 | WVRQAPGKGLEWVGRIKSVTDGETTDYAAPVKGRF | TAPKLLIYKNNQRPSGVPDRFSGSKSGTSASLAISGLRSEDE |
| | | TISRDDSKSTLYLQMNSLKTEDTAVYYCTSSFCCR | ADYYCSTWDDSLSVRVFGGGTKLTVL (SEQ ID NO: 149) |
| | | GGSCPSHDTSFCGGQDSRYYYMDVWGKGTTVTVSS | |
| | | (SEQ ID NO: 103) | |
| 28 | AIP- | EVQLVESGGALVKPGGSLRLSCAASGFTFSKAWMT | QSVLTQPPSASGTPGQRVTISCSGSSSNIGSSSVSWYQQLPG |
| | 166120 | WVRQAPGKGLEWVGRIKSVTDGETTDYAAPVKGRF | TAPKLLIYKNNQRPSGVPDRFSGSKSGTSASLAISGLRSEDE |
| | | TISRDDSKSTLYLQMNSLKTEDTAVYYCTSSFCCR | ADYYCSTWDDSLSVRVFGGGTKLTVL (SEQ ID NO: 150) |
| | | GGSCPSHDTSYCGGQYKSYYYMDVWGKGTTVTVSS | |
| | | (SEQ ID NO: 104) | |
| 29 | AIP- | EVQLVESGGALVKPGGSLRLSCAASGFTFSKAWMT | QSVLTQPPSASGTPGQRVTISCSGSSSNIGSSSVSWYQQLPG |
| | 133645 | WVRQAPGKGLEWVGRIKSVTDGETTDYAAPVKGRF | TAPKLLIYKNNQRPSGVPDRFSGSKSGTSASLAISGLRSEDE |
| | | TISRDDSKSTLYLQMNSLKTEDTAVYYCTSSFCCR | ADYYCSTWDESLSVRVFGGGTKLTVL (SEQ ID NO: 151) |
| | | GGSCPSHDTSFCGGQYKSYYYMDVWGKGTTVTVSS | |
| | | (SEQ ID NO: 105) | |
| 30 | AIP- | EVQLVESGGALVKPGGSLRLSCAASGFTFSKAWMS | QSVLTQPPSASGTPGQRVTISCSGSSSNIGSSSVSWYQQLPG |
| | 187893 | WVRQAPGKGLEWVGRIKSVTDGETTDYAAPVKGRF | TAPKLLIYKNNQRPSGVPDRFSGSKSGTSASLAISGLRSEDE |
| | | TISRDDSKSTLYLQMNSLKTEDTAVYYCTSSFCCR | ADYYCSTWDDSLSVRVFGGGTKLTVL (SEQ ID NO: 152) |
| | | GGSCPSHDTSFCGGQYKSYYYMDVWGKGTTVTVSS | |
| | | (SEQ ID NO: 106) | |
| 31 | AIP- | EVQLVESGGALVKPGGSLRLSCAASGFTFSKAWMT | QSVLTQPPSASGTPGQRVTISCSGSSSNIGSSSVSWYQQLPG |
| | 142079 | WVRQAPGKGLEWVGRIKSVTDGETTDYAAPVKGRF | TAPKLLIYKNNQRPSGVPDRFSGSKSGTSASLAISGLRSEDE |
| | | TISRDDSKSTLYLQMNSLKTEDTAVYYCTSSFCCR | ADYYCSTWDDSLSVRVFGGGTKLTVL (SEQ ID NO: 153) |
| | | GGSCPSHDTSFCGGSYKSYYYMDVWGKGTTVTVSS | |
| | | (SEQ ID NO: 107) | |
| 32 | AIP- | EVQLVESGGALVKPGGSLRLSCAASGFTFSKAWMT | QSVLTQPPSASGTPGQRVTISCSGSSSNIGSSSVSWYQQLPG |
| | 104188 | WVRQAPGKGLEWVGRIKSVTDGETTDYAAPVKGRF | TAPKLLIYKNNQRPSGVPDRFSGSKSGTSASLAISGLRSEDE |
| | | TISRDDSKSTLYLQMNSLKTEDTAVYYCTSSFCCR | ADYYCSTWDESLSVRVFGGGTKLTVL (SEQ ID NO: 154) |
| | | GGSCPSHDTSYCGGQDSRYYYMDVWGKGTTVTVSS | |
| | | (SEQ ID NO: 108) | |
| 33 | AIP- | EVQLVESGGGLVKPGGSLRLSCAASGFTFSKAWMT | QSVLTQPPSASGTPGQRVTISCSGSSSNIGSSSVSWYQQLPG |
| | 106042 | WVRQAPGKGLEWVGRIKSVTEGETTDYAAPVKGRF | TAPKLLIYKNNQRPSGVPDRFSGSKSGTSASLAISGLRSEDE |
| | | TISRDDSKNTLYLQMNSLKTEDTAVYYCTTSFCCR | ADYYCSTWDESLSVRVFGGGTKLTVL (SEQ ID NO: 155) |
| | | GGSCPSHDTSFCGGQYKSYYYMDVWGQGTTVTVSS | |
| | | (SEQ ID NO: 109) | |
| 34 | AIP- | EVQLVESGGALVKPGGSLRLSCAASGFTFSKAWMT | QSVLTQPPSASGTPGQRVTISCSGSSSNIGSSSVSWYQQLPG |
| | 100196 | WVRQAPGKGLEWVGRIKSVTEGETTDYAAPVKGRF | TAPKLLIYKNNQRPSGVPDRFSGSKSGTSASLAISGLRSEDE |
| | | TISRDDSKSTLYLQMNSLKTEDTAVYYCTSSFCCR | ADYYCSTWDESLSVRVFGGGTKLTVL (SEQ ID NO: 156) |
| | | GGSCPSHDTSFCGGQYKSYYYMDVWGKGTTVTVSS | |
| | | (SEQ ID NO: 110) | |
| 35 | AIP- | EVQLVESGGALVKPGGSLRLSCAASGFTFSKAWMS | QSVLTQPPSASGTPGQRVTISCSGSSSNIGSSSVSWYQQLPG |
| | 180675 | WVRQAPGKGLEWVGRIKSVTDGETTDYAAPVKGRF | TAPKLLIYKNNQRPSGVPDRFSGSKSGTSASLAISGLRSEDE |
| | | TISRDDSKSTLYLQMNSLKTEDTAVYYCTSSFCCR | ADYYCSTWDDSLSVRVFGGGTKLTVL (SEQ ID NO: 157) |
| | | GGSCPSHDTSYCGGQYKSYYFMDVWGKGTTVTVSS | |
| | | (SEQ ID NO: 111) | |
| 36 | AIP- | EVQLVESGGALVKPGGSLRLSCAASGFTFSKAWMS | QSVLTQPPSASGTPGQRVTISCSGSSSNIGSSSVYWYQQLPG |
| | 170105 | WVRQAPGKGLEWVGRIKSVTDGETTDYAAPVKGRF | TAPKLLIYKNNQRPSGVPDRFSGSKSGTSASLAISGLRSEDE |
| | | TISRDDSKSTLYLQMNSLKTEDTAVYYCTSSFCCR | ADYYCSTWDDSLSVRVFGGGTKLTVL (SEQ ID NO: 158) |
| | | GGSCPSHDTSYCGGQYKSYYYMDVWGKGTTVTVSS | |
| | | (SEQ ID NO: 112) | |
| 37 | AIP- | EVQLVESGGALVKPGGSLRLSCAASGFTFSKAWMS | QSVLTQPPSASGTPGQRVTISCSGSSSNIGSSSVSWYQQLPG |
| | 126080 | WVRQAPGKGLEWVGRIKSVTDGETTDYAAPVKGRF | TAPKLLIYKNNQRPSGVPDRFSGSKSGTSASLAISGLRSEDE |
| | | TISRDDSKSTLYLQMNSLKTEDTAVYYCTSSFCCR | ADYYCSTWDDSLSVRVFGGGTKLTVL (SEQ ID NO: 159) |
| | | GGSCPSHDTSYCGGQNKQYYYMDVWGKGTTVTVSS | |
| | | (SEQ ID NO: 113) | |
| 38 | AIP- | EVQLVESGGALVKPGGSLRLSCAASGFTFSKAWMS | QSVLTQPPSASGTPGQRVTISCSGSSSNIGSSSVSWYQQLPG |
| | 161571 | WVRQAPGKGLEWVGRIKSVTDGETTDYAAPVKGRF | TAPKLLIYKNNQRPSGVPDRFSGSKSGTSASLAISGLRSEDE |
| | | TISRDDSKSTLYLQMNSLKTEDTAVYYCTSSFCCR | ADYYCSTWDDSLSVRVFGGGTKLTVL (SEQ ID NO: 160) |
| | | GGNCPSHETSYCGNQYKSYYYMDVWGKGTTVTVSS | |
| | | (SEQ ID NO: 114) | |
| 39 | AIP- | EVQLVESGGALVKPGGSLRLSCAASGFTFSKAWMS | QSVLTQPPSASGTPGQRVTISCSGSSSNIGSSSVSWYQQLPG |
| | 181246 | WVRQAPGKGLEWVGRIKSVTDGETTDYAAPVKGRF | TAPKLLIYKNNQRPSGVPDRFSGSKSGTSASLAISGLRSEDE |
| | | TISRDDSKSTLYLQMNSLKTEDTAVYYCTSSFCCR | ADYYCSTWDDSLSVRVFGGGTKLTVL (SEQ ID NO: 161) |
| | | GGSCPSHDTSYCGGQYKSYYYVNIWGKGTTVTVSS | |
| | | (SEQ ID NO: 115) | |
| 40 | AIP- | EVQLVESGGALVKPGGSLRLSCAASGFTFSKAWMS | QSVLTQPPSASGTPGQRVTISCSGSSSNIGSSSVSWYQQLPG |
| | 192216 | WVRQAPGKGLEWVGRIKSVTDGETTDYAAPVKGRF | TAPKLLIYKNNQRPSGVPDRFSGSKSGTSASLAISGLRSEDE |
| | | TISRDDSKSTLYLQMNSLKTEDTAVYYCTTSFCCR | ADYYCSTWDDSLSVRVFGGGTKLTVL (SEQ ID NO: 162) |
| | | GACPSHDTSYCAGSYKSYYYMDVWGKGTTVTVSS | |
| | | (SEQ ID NO: 116) | |
| 41 | AIP- | EVQLVESGGALVKPGGSLRLSCAASGFTFSKAWMS | QSVLTQPPSASGTPGQRVTISCSGSSSDIGSSSVSWYQQLPG |
| | 168605 | WVRQAPGKGLEWVGRIKSVTDGETTDYAAPVKGRF | TAPKLLIYKNNQRPSGVPDRFSGSKSGTSASLAISGLRSEDE |
| | | TISRDDSKSTLYLQMNSLKTEDTAVYYCTSSFCCR | ADYYCSTWNDALSVRVFGGGTKLTVL (SEQ ID NO: 163) |
| | | GGSCPSHDTSYCGGQYKSYYYMDVWGKGTTVTVSS | |
| | | (SEQ ID NO: 117) | |
| 42 | AIP- | EVQLVESGGALVKPGGSLRLSCAASGFTFSKAWMS | QSVLTQPPSASGTPGQRVTISCSGSSSNIGSSSVSWYQQLPG |
| | 172872 | WVRQAPGKGLEWVGRIKSVTDGEQTDYAAPVKGRF | TAPKLLIYKNTQRPSGVPDRFSGSKSGTSASLAISGLRSEDE |
| | | TISRDDSKSTLYLQMNSLKTEDTAVYYCTSSFCCR | ADYYCSTWDDSLNVRVFGGGTKLTVL (SEQ ID NO: 164) |
| | | GGSCPSHDTSYCGGQYKSYYYMDVWGKGTTVTVSS | |
| | | (SEQ ID NO: 118) | |
| 43 | AIP- | EVQLVESGGALVKPGGSLRLSCAASGFTFSKAWMT | QSVLTQPPSASGTPGQRVTISCSGSPSNIGSSSVSWYQQLPG |
| | 190051 | WVRQAPGKGLEWVGRIKSVTDGETTDYAAPVKGRF | TAPKLLIYKNNQRPSGVPDRFSGSKSGTSASLAISGLRSEDE |
| | | TISRDDSKSTLYLQMNSLKTEDTAVYYCTSSFCCR | ADYYCSTWDDALSVRVFGGGTKLTVL (SEQ ID NO: 165) |
| | | GGSCPSHDTSYCGGQYKSYYYMDVWGKGTTVTVSS | |
| | | (SEQ ID NO: 119) | |
| 44 | AIP- | EVQLVESGGALVKPGGSLRLSCAASGFTFSKAWMS | QSVLTQPPSASGTPGQRVTISCSGSSSNIGSSSVSWYQQLPG |
| | 167533 | WVRQAPGKGLEWVGRIKAADDGKQTDYAAPVKGRF | TAPKLLIYKNNQRPSGVPDRFSGSKSGTSASLAISGLRSEDE |
| | | TISRDDSKSTLYLQMNSLKTEDTAVYYCTSSFCCR | ADYYCSTWDDSLSVRVFGGGTKLTVL (SEQ ID NO: 166) |
| | | GGSCPSHDTSYCGGQYKSYYYMDVWGKGTTVTVSS | |
| | | (SEQ ID NO: 120) | |
| 45 | AIP- | EVQLVESGGALVKPGGSLRLSCAASGFTFSKAWMS | QSVLTQPPSASGTPGQRVTISCSGSSSNIGSSSVSWYQQLPG |
| | 112580 | WVRQAPGKGLEWVGRIKSVTDGETTDYAAPVKGRF | TAPKLLIYKNNQRPSGVPDRFSGSKSGTSASLAISGLRSEDE |
| | | TISRDDSKSTLYLQMNSLKTEDTAVYYCISSFCCR | ADYYCSTWDDSLSVRVFGGGTKLTVL (SEQ ID NO: 167) |
| | | GNSCPSSDTSYCNGQYKSYYYMDVWGKGTTVTVSS | |
| | | (SEQ ID NO: 121) | |
| 46 | AIP- | EVQLVESGGALVKPGGSLRLSCAASGFTFSKAWMS | QSVLTQPPSASGTPGQRVTISCSGSSSNIGSSSVSWYQQLPG |
| | 136060 | WVRQAPGKGLEWVGRIKSVTDGETTDYAAPVKGRF | TAPKLLIYKNSLRPQGVPDRFSGSKSGTSASLAISGLRSEDE |
| | | TISRDDSKSTLYLQMNSLKTEDTAVYYCTSSFCCR | ADYYCSTWDDSLSVRVFGGGTKLTVL (SEQ ID NO: 168) |
| | | GGSCPSHDTSYCGGQYKSYYYMDVWGKGTTVTVSS | |
| | | (SEQ ID NO: 122) | |
| 47 | AIP- | EVQLVESGGALVKPGGSLRLSCAASGFTFSKAWMS | QSVLTQPPSASGTPGQRVTISCSGSSSNIGSSSVSWYQQLPG |
| | 125646 | WVRQAPGKGLEWVGRIKSVTDGETTDYAAPVKGRF | TAPKLLIYKNNQRPSGVPDRFSGSKSGTSASLAISGLRSEDE |
| | | TISRDDSKSTLYLQMNSLKTEDTAVYYCTSSFCCR | ADYYCSTWDDSLSVRVFGGGTKLTVL (SEQ ID NO: 123) |
| | | GGSCPSHDTSYCGQYKSYYYMDVWGKGTTVTVSS | |
| | | (SEQ ID NO: 1746) | |

TABLE 2B

| | AIP | | | | | | |
|---|---|---|---|---|---|---|---|
| | Number | HCDR1 | HCDR2 | HCDR3 | LCDR1 | LCDR2 | LCDR3 |
| 1 | AIP- | GFTFSKAWMS | RIKSVTDGETTDYA | TSSFCCRSGSCPSS | SGSSSNIGSSSV | KNNQRPS | STWDDSLSVRV |
| | 101235 | (SEQ ID | APVKG (SEQ ID | DTSYCNGQYKSYYY | S (SEQ ID | (SEQ ID | (SEQ ID |
| | | NO: 1) | NO: 9) | MDV (SEQ ID | NO: 48) | NO: 59) | NO: 68) |
| | | | | NO: 20) | | | |
| 2 | AIP- | GFTFSKAWMS | RIKSVTDGETTEYA | TSSFCCRGGSCPSH | SGSSSNIGSSSV | KNNQRPS | STWDDSLSVRV |
| | 127782 | (SEQ ID | ASVKG (SEQ ID | DTSYCGGQYKSYYY | S (SEQ ID | (SEQ ID | (SEQ ID |
| | | NO: 1) | NO: 504) | MDV (SEQ ID | NO: 48) | NO: 59) | NO: 68) |
| | | | | NO: 21) | | | |
| 3 | AIP- | GFTFSKAWMS | RIKSVTDGETTDYA | TTSFCCRGASCPSS | SGSSSNIGSSSV | KNNQRPS | STWDDSLSVRV |
| | 189473 | (SEQ ID | APVKG (SEQ ID | DTSYCAGSYKSYYF | S (SEQ ID | (SEQ ID | (SEQ ID |
| | | NO: 1) | NO: 9) | VNI (SEQ ID | NO: 48) | NO: 59) | NO: 68) |
| | | | | NO: 22) | | | |
| 4 | AIP- | GFTFSKAWMS | RIKSVTDGETTDYA | TSSFCCRGNQCPSS | SGSSSNIGSSSV | KNNQRPS | STWDDSLSVRV |
| | 192571 | (SEQ ID | APVKG (SEQ ID | DTSYCGGQYPSYYY | S (SEQ ID | (SEQ ID | (SEQ ID |
| | | NO: 1) | NO: 9) | MDP (SEQ ID | NO: 48) | NO: 59) | NO: 68) |
| | | | | NO: 23) | | | |
| 5 | AIP- | GFTFSKAWMS | RIKSVTDGETTDYA | ISSFCCRGKQCPSS | SGSSSNIGSSSV | KNNQRPS | STWDDSLSVRV |
| | 125258 | (SEQ ID | APVKG (SEQ ID | DTSYCNGYYADYYF | S (SEQ ID | (SEQ ID | (SEQ ID |
| | | NO: 1) | NO: 9) | MDV (SEQ ID | NO: 48) | NO: 59) | NO: 68) |
| | | | | NO: 24) | | | |
| 6 | AIP- | GFTFSKAWMS | RIKSVTDGETTDYA | ISSFCCRGKQCPSS | SGSSSNIGSSSV | KNNQRPS | STWDDSLSVRV |
| | 150199 | (SEQ ID | APVKG (SEQ ID | DTSYCGGQFKSYYF | S (SEQ ID | (SEQ ID | (SEQ ID |
| | | NO: 1) | NO: 9) | MDV (SEQ ID | NO: 48) | NO: 59) | NO: 68) |
| | | | | NO: 25) | | | |
| 7 | AIP- | GFTFSKAWMS | RIKSVTDGETTDYA | ISSFCCHSNNCPSS | SGSSSNIGSSSV | KNNQRPS | STWDDSLSVRV |
| | 115388 | (SEQ ID | APVKG (SEQ ID | DTSYCNGYYKQYYF | S (SEQ ID | (SEQ ID | (SEQ ID |
| | | NO: 1) | NO: 9) | MDV (SEQ ID | NO: 48) | NO: 59) | NO: 68) |
| | | | | NO: 26) | | | |
| 8 | AIP- | GFTYSAAWMS | RIKAVHDGETTDYA | TSSFCCRGGSCPSH | SGSSTNIGSSSV | KDNQRPL | STWDDSLSVRV |
| | 143369 | (SEQ ID | APVKG (SEQ ID | DTSYCGGQYKSYYY | T (SEQ ID | (SEQ ID | (SEQ ID |
| | | NO: 2) | NO: 10) | MDV (SEQ ID | NO: 49) | NO: 60) | NO: 68) |
| | | | | NO: 21) | | | |
| 9 | AIP- | GFTFSMAWMS | RIKSNTDAETTDYA | TSSFCCRGGSCPSH | SGSKSNIGSSYV | MNNQRPY | ATWDDQLSVRV |
| | 157045 | (SEQ ID | APVKG (SEQ ID | DTSYCGGQYKSYYY | S (SEQ ID | (SEQ ID | (SEQ ID |
| | | NO: 3) | NO: 11) | MDV (SEQ ID | NO: 50) | NO: 61) | NO: 69) |
| | | | | NO: 21) | | | |
| 10 | AIP- | GFTFSAAWMS | RIKSVTDGETTDYA | ISSFCCRGNSCPSS | SGSKSNIGSSSV | KDNQRPS | ATWDNSLSIRV |
| | 175775 | (SEQ ID | APVKG (SEQ ID | DTSYCNGQYKSYYY | S (SEQ ID | (SEQ ID | (SEQ ID |
| | | NO: 4) | NO: 9) | MDV (SEQ ID | NO: 51) | NO: 62) | NO: 70) |
| | | | | NO: 27) | | | |
| 11 | AIP- | GFTYSKAWMS | RIKSVQDGETTDYA | TSSFCCRGGSCPSH | SGASSNIGSSSV | KNTQRAS | SSWDDSNSVRI |
| | 154181 | (SEQ ID | APVKG (SEQ ID | DTSYCGGQYKSFYY | S (SEQ ID | (SEQ ID | (SEQ ID |
| | | NO: 5) | NO: 12) | MDV (SEQ ID | NO: 52) | NO: 63) | NO: 71) |
| | | | | NO: 28) | | | |
| 12 | AIP- | GFTFAKAWMS | RIKSVTDGHTTDYA | TSSFCCRGGSCPSH | SGSSTNIGSSTV | KNNARPY | ATWDDSLTVRI |
| | 125984 | (SEQ ID | APVKG (SEQ ID | DTSYCGGQYKSYYY | S (SEQ ID | (SEQ ID | (SEQ ID |
| | | NO: 6) | NO: 13) | MDV (SEQ ID | NO: 53) | NO: 64) | NO: 76) |
| | | | | NO: 21) | | | |
| 13 | AIP- | GFVFSKAWMS | RIKSVTDGGITDYA | ISSFCCRGNSCPSS | SGASSNIGSSSV | KNTQRPS | ATWDDQLSVRV |
| | 160829 | (SEQ ID | APVKG | DTSYCNGQYKSYYF | S (SEQ ID | (SEQ ID | (SEQ ID |
| | | NO: 7) | (SEQ ID | MDV (SEQ ID | NO: 52) | NO: 65) | NO: 69) |
| | | | NO: 14) | NO: 29) | | | |
| 14 | AIP- | GFTFSAAWMS | RIKSTSDGETTDYA | ISSFCCRGGSCPSR | SGSSTNIGSSSV | KDNQRPS | SSWDDSNSVRI |
| | 184744 | (SEQ ID | APVKG (SEQ ID | DTSYCGGQYKSYYF | S (SEQ ID | (SEQ ID | (SEQ ID |
| | | NO: 4) | NO: 15) | MDV (SEQ ID | NO: 54) | NO: 62) | NO: 71) |
| | | | | NO: 30) | | | |
| 15 | AIP- | GFTFSKAWMS | RIKSVQDGETTDYA | TSSFCCRGGSCPSS | SGSKSNIGSSSV | KNNQRPY | STWDDALSVRV |
| | 128136 | (SEQ ID | APVKG (SEQ ID | DTSYCGGYYKSYYF | Y (SEQ ID | (SEQ ID | (SEQ ID |
| | | NO: 1) | NO: 12) | MDV (SEQ ID | NO: 55) | NO: 66) | NO: 72) |
| | | | | NO: 31) | | | |
| 16 | AIP- | GFTFSKAWMS | RIKSVTDGETTDYA | TSSFCCRGGSCPSS | SGSSSNIGSSSV | KNNQRPS | STWDDALSVRV |
| | 181273 | (SEQ ID | APVKG (SEQ ID | DTSYCGGQYKSYYF | Y (SEQ ID | (SEQ ID | (SEQ ID |
| | | NO: 1) | NO: 9) | MDV (SEQ ID | NO: 56) | NO: 59) | NO: 72) |
| | | | | NO: 32) | | | |
| 17 | AIP- | GFTFSKAWMS | RIKSVQDGETTDYA | TSSFCCRGGSCPSH | SGSKSNIGSSYV | KNNQRPY | STWDDSLSVRV |
| | 153125 | (SEQ ID | APVKG (SEQ ID | DTSYCGGYYKSYYY | S (SEQ ID | (SEQ ID | (SEQ ID |
| | | NO: 1) | NO: 12) | MDV (SEQ ID | NO: 50) | NO: 66) | NO: 68) |
| | | | | NO: 33) | | | |
| 18 | AIP- | GFTFSKAWMS | RIKSVTDGETTDYA | TSSFCCRGGSCPSH | SGSSSNIGSSSV | KNNQRPS | STWDDSLSVRV |
| | 160470 | (SEQ ID | APVKG (SEQ ID | DTSYCGGQYKSYYY | S (SEQ ID | (SEQ ID | (SEQ ID |
| | | NO: 1) | NO: 9) | MDV (SEQ ID | NO: 48) | NO: 59) | NO: 68) |
| | | | | NO: 21) | | | |
| 19 | AIP- | GFTFSKAWMT | RIKSVTDGETTDYA | TSSFCCRGGSCPSH | SGSSSNIGSSSV | KNNQRPS | STWDDSLSVRV |
| | 192482 | (SEQ ID | APVKG (SEQ ID | DTSFCGGQDKRYYY | S (SEQ ID | (SEQ ID | (SEQ ID |
| | | NO: 8) | NO: 9) | MDV (SEQ ID | NO: 48) | NO: 59) | NO: 68) |
| | | | | NO: 34) | | | |
| 20 | AIP- | GFTFSKAWMT | RIKSVTDGETTDYA | TTSFCCRGGSCPSH | SGSSSNIGSSSV | KNNQRPS | STWDDSLSVRV |
| | 171142 | (SEQ ID | APVKG (SEQ ID | DTSFCGGQDKRYYY | S (SEQ ID | (SEQ ID | (SEQ ID |
| | | NO: 8) | NO: 9) | MDV (SEQ ID | NO: 48) | NO: 59) | NO: 68) |
| | | | | NO: 35) | | | |
| 21 | AIP- | GFTFSKAWMT | RIKSVTDGETTDYA | TSSFCCRGGSCPSH | SGSSSNIGSSSV | KNNQRPS | STWDDSLSVRV |
| | 157397 | (SEQ ID | APVKG (SEQ ID | DTSFCGGQYNRYYY | S (SEQ ID | (SEQ ID | (SEQ ID |
| | | NO: 8) | NO: 9) | MDV (SEQ ID | NO: 48) | NO: 59) | NO: 68) |
| | | | | NO: 36) | | | |
| 22 | AIP- | GFTFSKAWMT | RIKSVTDGETTDYA | TSSFCCRGGSCPSH | SGSSSNIGSSSV | KNNQRPS | STWDDSLSVRV |
| | 165430 | (SEQ ID | APVKG (SEQ ID | DTSFCGGQYKSYYY | S (SEQ ID | (SEQ ID | (SEQ ID |
| | | NO: 8) | NO: 9) | MDV (SEQ ID | NO: 48) | NO: 59) | NO: 68) |
| | | | | NO: 37) | | | |
| 23 | AIP- | GFTFSKAWMT | RIKSTSDGGITDYA | TTSFCCRGGRCPSR | SGSSSNIGSSSV | KNNQRPS | STWDDSLSVRV |
| | 189526 | (SEQ ID | APVKG | DTSFCGGQYNSYYY | S (SEQ ID | (SEQ ID | (SEQ ID |
| | | NO: 8) | (SEQ ID | MDV (SEQ ID | NO: 48) | NO: 59) | NO: 68) |
| | | | NO: 16) | NO: 38) | | | |
| 24 | AIP- | GFTFSKAWMT | RIKSVTDGETTDYA | TSSFCCRGGSCPSH | SGSSSNIGSSSV | KNNQRPS | STWDDSLSVRV |
| | 122563 | (SEQ ID | APVKG (SEQ ID | DTSFCGGQDKRYYY | S (SEQ ID | (SEQ ID | (SEQ ID |
| | | NO: 8) | NO: 9) | MDV (SEQ ID | NO: 48) | NO: 59) | NO: 68) |
| | | | | NO: 34) | | | |
| 25 | AIP- | GFTFSKAWMT | RIKSVTDGETTDYA | TSSFCCRGGSCPSH | SGSSSNIGSSSV | KNNQRPS | STWDDSLSVRV |
| | 158623 | (SEQ ID | APVKG (SEQ ID | DTSFCGGQYKSYYY | S (SEQ ID | (SEQ ID | (SEQ ID |
| | | NO: 8) | NO: 9) | MDV (SEQ ID | NO: 48) | NO: 59) | NO: 68) |
| | | | | NO: 37) | | | |
| 26 | AIP- | GFTFSKAWMT | RIKSVTDGETTDYA | TTSFCCRGGSCPSH | SGSSSNIGSSSV | KNNQRPS | STWDDSLSVRV |
| | 155066 | (SEQ ID | APVKG (SEQ ID | DTSFCGGQYKSYYY | S (SEQ ID | (SEQ ID | (SEQ ID |
| | | NO: 8) | NO: 9) | MDV (SEQ ID | NO: 48) | NO: 59) | NO: 68) |
| | | | | NO: 39) | | | |
| 27 | AIP- | GFTFSKAWMT | RIKSVTDGETTDYA | TSSFCCRGGSCPSH | SGSSSNIGSSSV | KNNQRPS | STWDDSLSVRV |
| | 136538 | (SEQ ID | APVKG (SEQ ID | DTSFCGGQDSRYYY | S (SEQ ID | (SEQ ID | (SEQ ID |
| | | NO: 8) | NO: 9) | MDV (SEQ ID | NO: 48) | NO: 59) | NO: 68) |
| | | | | NO: 40) | | | |
| 28 | AIP- | GFTFSKAWMT | RIKSVTDGETTDYA | TSSFCCRGGSCPSH | SGSSSNIGSSSV | KNNQRPS | STWDDSLSVRV |
| | 166120 | (SEQ ID | APVKG (SEQ ID | DTSYCGGQYKSYYY | S (SEQ ID | (SEQ ID | (SEQ ID |
| | | NO: 8) | NO: 9) | MDV (SEQ ID | NO: 48) | NO: 59) | NO: 68) |
| | | | | NO: 21) | | | |
| 29 | AIP- | GFTFSKAWMT | RIKSVTDGETTDYA | TSSFCCRGGSCPSH | SGSSSNIGSSSV | KNNQRPS | STWDESLSVRV |
| | 133645 | (SEQ ID | APVKG (SEQ ID | DTSFCGGQYKSYYY | S (SEQ ID | (SEQ ID | (SEQ ID |
| | | NO: 8) | NO: 9) | MDV (SEQ ID | NO: 48) | NO: 59) | NO: 73) |
| | | | | NO: 37) | | | |
| 30 | AIP- | GFTFSKAWMS | RIKSVTDGETTDYA | TSSFCCRGGSCPSH | SGSSSNIGSSSV | KNNQRPS | STWDDSLSVRV |
| | 187893 | (SEQ ID | APVKG (SEQ ID | DTSFCGGQYKSYYY | S (SEQ ID | (SEQ ID | (SEQ ID |
| | | NO: 1) | NO: 9) | MDV (SEQ ID | NO: 48) | NO: 59) | NO: 68) |
| | | | | NO: 37) | | | |
| 31 | AIP- | GFTFSKAWMT | RIKSVTDGETTDYA | TSSFCCRGGSCPSH | SGSSSNIGSSSV | KNNQRPS | STWDDSLSVRV |
| | 142079 | (SEQ ID | APVKG (SEQ ID | DTSFCGGSYKSYYY | S (SEQ ID | (SEQ ID | (SEQ ID |
| | | NO: 8) | NO: 9) | MDV (SEQ ID | NO: 48) | NO: 59) | NO: 68) |
| | | | | NO: 41) | | | |
| 32 | AIP- | GFTFSKAWMT | RIKSVTDGETTDYA | TSSFCCRGGSCPSH | SGSSSNIGSSSV | KNNQRPS | STWDESLSVRV |
| | 104188 | (SEQ ID | APVKG (SEQ ID | DTSYCGGQDSRYYY | S (SEQ ID | (SEQ ID | (SEQ ID |
| | | NO: 8) | NO: 9) | MDV (SEQ ID | NO: 48) | NO: 59) | NO: 73) |
| | | | | NO: 42) | | | |
| 33 | AIP- | GFTFSKAWMT | RIKSVTEGETTDYA | TTSFCCRGGSCPSH | SGSSSNIGSSSV | KNNQRPS | STWDESLSVRV |
| | 106042 | (SEQ ID | APVKG (SEQ ID | DTSFCGGQYKSYYY | S (SEQ ID | (SEQ ID | (SEQ ID |
| | | NO: 8) | NO: 17) | MDV (SEQ ID | NO: 48) | NO: 59) | NO: 73) |
| | | | | NO: 39) | | | |
| 34 | AIP- | GFTFSKAWMT | RIKSVTEGETTDYA | TSSFCCRGGSCPSH | SGSSSNIGSSSV | KNNQRPS | STWDESLSVRV |
| | 100196 | (SEQ ID | APVKG (SEQ ID | DTSFCGGQYKSYYY | S (SEQ ID | (SEQ ID | (SEQ ID |
| | | NO: 8) | NO: 17) | MDV (SEQ ID | NO: 48) | NO: 59) | NO: 73) |
| | | | | NO: 37) | | | |
| 35 | AIP- | GFTFSKAWMS | RIKSVTDGETTDYA | TSSFCCRGGSCPSH | SGSSSNIGSSSV | KNNQRPS | STWDDSLSVRV |
| | 180675 | (SEQ ID | APVKG (SEQ ID | DTSYCGGQYKSYYF | S (SEQ ID | (SEQ ID | (SEQ ID |
| | | NO: 1) | NO: 9) | MDV (SEQ ID | NO: 48) | NO: 59) | NO: 68) |
| | | | | NO: 43) | | | |
| 36 | AIP- | GFTFSKAWMS | RIKSVTDGETTDYA | TSSFCCRGGSCPSH | SGSSSNIGSSSV | KNNQRPS | STWDDSLSVRV |
| | 170105 | (SEQ ID | APVKG (SEQ ID | DTSYCGGQYKSYYY | Y (SEQ ID | (SEQ ID | (SEQ ID |
| | | NO: 1) | NO: 9) | MDV (SEQ ID | NO: 56) | NO: 59) | NO: 68) |
| | | | | NO: 21) | | | |
| 37 | AIP- | GFTFSKAWMS | RIKSVTDGETTDYA | TSSFCCRGGSCPSH | SGSSSNIGSSSV | KNNQRPS | STWDDSLSVRV |
| | 126080 | (SEQ ID | APVKG (SEQ ID | DTSYCGGQNKQYYY | S (SEQ ID | (SEQ ID | (SEQ ID |
| | | NO: 1) | NO: 9) | MDV (SEQ ID | NO: 48) | NO: 59) | NO: 68) |
| | | | | NO: 44) | | | |
| 38 | AIP- | GFTFSKAWMS | RIKSVTDGETTDYA | TSSFCCRGGNCPSH | SGSSSNIGSSSV | KNNQRPS | STWDDSLSVRV |
| | 161571 | (SEQ ID | APVKG (SEQ ID | ETSYCGNQYKSYYY | S (SEQ ID | (SEQ ID | (SEQ ID |
| | | NO: 1) | NO: 9) | MDV (SEQ ID | NO: 48) | NO: 59) | NO: 68) |
| | | | | NO: 45) | | | |
| 39 | AIP- | GFTFSKAWMS | RIKSVTDGETTDYA | TSSFCCRGGSCPSH | SGSSSNIGSSSV | KNNQRPS | STWDDSLSVRV |
| | 181246 | (SEQ ID | APVKG (SEQ ID | DTSYCGGQYKSYYY | S (SEQ ID | (SEQ ID | (SEQ ID |
| | | NO: 1) | NO: 9) | VNI (SEQ ID | NO: 48) | NO: 59) | NO: 68) |
| | | | | NO: 46) | | | |
| 40 | AIP- | GFTFSKAWMS | RIKSVTDGETTDYA | TTSFCCRGASCPSH | SGSSSNIGSSSV | KNNQRPS | STWDDSLSVRV |
| | 192216 | (SEQ ID | APVKG (SEQ ID | DTSYCAGSYKSYYY | S (SEQ ID | (SEQ ID | (SEQ ID |
| | | NO: 1) | NO: 9) | MDV (SEQ ID | NO: 48) | NO: 59) | NO: 68) |
| | | | | NO: 47) | | | |
| 41 | AIP- | GFTFSKAWMS | RIKSVTDGETTDYA | TSSFCCRGGSCPSH | SGSSSDIGSSSV | KNNQRPS | STWNDALSVRV |
| | 168605 | (SEQ ID | APVKG (SEQ ID | DTSYCGGQYKSYYY | S (SEQ ID | (SEQ ID | (SEQ ID |
| | | NO: 1) | NO: 9) | MDV (SEQ ID | NO: 57) | NO: 59) | NO: 74) |
| | | | | NO: 21) | | | |
| 42 | AIP- | GFTFSKAWMS | RIKSVTDGEQTDYA | TSSFCCRGGSCPSH | SGSSSNIGSSSV | KNTQRPS | STWDDSLNVRV |
| | 172872 | (SEQ ID | APVKG | DTSYCGGQYKSYYY | S (SEQ ID | (SEQ ID | (SEQ ID |
| | | NO: 1) | (SEQ ID | MDV (SEQ ID | NO: 48) | NO: 65) | NO: 75) |
| | | | NO: 18) | NO: 21) | | | |
| 43 | AIP- | GFTFSKAWMT | RIKSVTDGETTDYA | TSSFCCRGGSCPSH | SGSPSNIGSSSV | KNNQRPS | STWDDALSVRV |
| | 190051 | (SEQ ID | APVKG (SEQ ID | DTSYCGGQYKSYYY | S (SEQ ID | (SEQ ID | (SEQ ID |
| | | NO: 8) | NO: 9) | MDV (SEQ ID | NO: 58) | NO: 59) | NO: 72) |
| | | | | NO: 21) | | | |
| 44 | AIP- | GFTFSKAWMS | RIKAADDGKQTDYA | TSSFCCRGGSCPSH | SGSSSNIGSSSV | KNNQRPS | STWDDSLSVRV |
| | 167533 | (SEQ ID | APVKG | DTSYCGGQYKSYYY | S (SEQ ID | (SEQ ID | (SEQ ID |
| | | NO: 1) | (SEQ ID NO: 19) | MDV (SEQ ID | NO: 48) | NO: 59) | NO: 68) |
| | | | | NO: 21) | | | |
| 45 | AIP- | GFTFSKAWMS | RIKSVTDGETTDYA | ISSFCCRGNSCPSS | SGSSSNIGSSSV | KNNQRPS | STWDDSLSVRV |
| | 112580 | (SEQ ID | APVKG (SEQ ID | DTSYCNGQYKSYYY | S (SEQ ID | (SEQ ID | (SEQ ID |
| | | NO: 1) | NO: 9) | MDV (SEQ ID | NO: 48) | NO: 59) | NO: 68) |
| | | | | NO: 27) | | | |
| 46 | AIP- | GFTFSKAWMS | RIKSVTDGETTDYA | TSSFCCRGGSCPSH | SGSSSNIGSSSV | KNSLRPQ | STWDDSLSVRV |
| | 136060 | (SEQ ID | APVKG (SEQ ID | DTSYCGGQYKSYYY | S (SEQ ID | (SEQ ID | (SEQ ID |
| | | NO: 1) | NO: 9) | MDV (SEQ ID | NO: 48) | NO: 67) | NO: 68) |
| | | | | NO: 21) | | | |
| 47 | AIP- | GFTFSKAWMS | RIKSVTDGETTDYA | TSSFCCRGGSCPSH | SGSSSNIGSSSV | KNNQRPS | STWDDSLSVRV |
| | 125646 | (SEQ ID | APVKG (SEQ ID | DTSYCGQYKSYYYM | S (SEQ ID | (SEQ ID | (SEQ ID |
| | | NO: 1) | NO: 9) | DV (SEQ ID | NO: 48) | NO: 59) | NO: 68) |
| | | | | NO: 1744) | | | |

TABLE 2A

| | AIP Number | V_{H} Sequence | V_{L} Sequence |
|---|---|---|---|
| 1 | AIP-148327 | EVQLVESGGALVKPGGSLRLSCAASGFTFSKAWMT | QSVLTQAPSASETPGQRVIISCSGSSSNIGSSSVSWYQQ |
| | | WVRQAPGKGLEWVGRIKSVTEGETTDYAAPVKGRF | LPGTAPKLLIYKNNQRPSGVPDRFSGSKSGTSASLAISG |
| | | TISRDDSKSVLYLQMSSLKTEDTAVYFCTSSFCCR | LRSEDEADYYCSTWDESLSVRVFGGGTKLTVL (SEQ |
| | | GGSCPSHDTSFCGGQDKRYYYMDVWGKGTTVTVSS | ID NO: 1527) |
| | | (SEQ ID NO: 1333) | |
| 2 | AIP-198092 | EVQLVESGGALVKPGGSLRLSCAASGFTFSKAWMT | QSVLTQPPSASGTPGQRVTISCSGSSSNIGSSSVSWYQQ |
| | | WVRQAPGKGLEWVGRIKSVTEGETTDYAAPVKGRF | LPGTAPKLLIYKNNQRPSGVPDRFSGSKSGTSASLAISG |
| | | TISRDDSKSTLYLQMNSLKTEDTAVYYCTSSFCCR | LRSEDEADYYCSTWDESLSVRVFGGGTKLTVL (SEQ |
| | | GGSCPSHDTSFCGGQDKRYYYMDVWGKGTTVTVSS | ID NO: 1528) |
| | | (SEQ ID NO: 1334) | |
| 3 | AIP-184490 | EVQLVESGGALVKPGGSLRLSCAASGFTFSKAWMT | QSVLTQPPSASGTPGQRVTISCSGSSSNIGSSSVSWYQQ |
| | | WVRQAPGKGLEWVGRIKSVTDGETTDYAAPVKGRF | LPGTAPKLLIYKNNQRPSGVPDRFSGSKSGTSASLAISG |
| | | TISRDDSKSTLYLQMNSLKTEDTAVYYCTSSFCCR | LRSEDEADYYCSTWDESLSVRVFGGGTKLTVL (SEQ |
| | | GGSCPSHDTSFCGGSYKSYYYMDVWGKGTTVTVSS | ID NO: 1529) |
| | | (SEQ ID NO: 1335) | |
| 4 | AIP-102396 | EVQLVESGGALVKPGGSLRLSCAASGFTFSKAWMS | QSVLTQPPSASGTPGQRVTISCSGSSSNIGSSSVSWYQQ |
| | | WVRQAPGKGLEWVGRIKSVTDGETTDYAAPVKGRF | LPGTAPKLLIYKNNQRPSGVPDRFSGSKSGTSASLAISG |
| | | TISRDDSKSTLYLQMNSLKTEDTAVYYCTSSFCCR | LRSEDEADYYCSTWDESLSVRVFGGGTKLTVL (SEQ |
| | | GGSCPSHDTSYCGGQYKSYYYMDVWGKGTTVTVSS | ID NO: 1530) |
| | | (SEQ ID NO: 1336) | |
| 5 | AIP-150055 | EVQLVESGGALVKPGGSLRLSCAASGYTFSKAWMS | QSVLTQPPSASGTPGQRVTISCSGSSSNIGSSSVSWYQQ |
| | | WVRQAPGKGLEWVGRIKSVTDGETTDYAAPVKGRF | LPGTAPKLLIYKNNQRPSGVPDRFSGSKSGTSASLAISG |
| | | TISRDDSKSTLYLQMNSLKTEDTAVYYCTSSFCCR | LRSEDEADYYCSTWDDSLSVRVFGGGTKLTVL (SEQ |
| | | GGSCPSHDTSYCGGQYKSYYYMDVWGKGTTVTVS | ID NO: 1531) |
| | | (SEQ ID NO: 1337) | |
| 6 | AIP-167084 | EVQLVESGGALVKPGGSLRLSCAASGFDFSKAWMS | QSVLTQPPSASGTPGQRVTISCSGSSSNIGSSSVSWYQQ |
| | | WVRQAPGKGLEWVGRIKSVTDGETTDYAAPVKGRF | LPGTAPKLLIYKNNQRPSGVPDRFSGSKSGTSASLAISG |
| | | TISRDDSKSTLYLQMNSLKTEDTAVYYCTSSFCCR | LRSEDEADYYCSTWDDSLSVRVFGGGTKLTVL (SEQ |
| | | GGSCPSHDTSYCGGQYKSYYYMDVWGKGTTVTVSS | ID NO: 1532) |
| | | (SEQ ID NO: 1338) | |
| 7 | AIP-185304 | EVQLVESGGALVKPGGSLRLSCAASGFVFSKAWMS | QSVLTQPPSASGTPGQRVTISCSGSSSNIGSSSVSWYQQ |
| | | WVRQAPGKGLEWVGRIKSVTDGETTDYAAPVKGRF | LPGTAPKLLIYKNNQRPSGVPDRFSGSKSGTSASLAISG |
| | | TISRDDSKSTLYLQMNSLKTEDTAVYYCTSSFCCR | LRSEDEADYYCSTWDDSLSVRVFGGGTKLTVL (SEQ |
| | | GGSCPSHDTSYCGGQYKSYYYMDVWGKGTTVTVSS | ID NO: 1533) |
| | | (SEQ ID NO: 1339) | |
| 8 | AIP-134770 | EVQLVESGGALVKPGGSLRLSCAASGFTYSKAWMS | QSVLTQPPSASGTPGQRVTISCSGSSSNIGSSSVSWYQQ |
| | | WVRQAPGKGLEWVGRIKSVTDGETTDYAAPVKGRF | LPGTAPKLLIYKNNQRPSGVPDRFSGSKSGTSASLAISG |
| | | TISRDDSKSTLYLQMNSLKTEDTAVYYCTSSFCCR | LRSEDEADYYCSTWDDSLSVRVFGGGTKLTVL (SEQ |
| | | GGSCPSHDTSYCGGQYKSYYYMDVWGKGTTVTVSS | ID NO: 1534) |
| | | SEQ ID NO: 1340) | |
| 9 | AIP-141887 | EVQLVESGGALVKPGGSLRLSCAASGFTFAKAWMS | QSVLTQPPSASGTPGQRVTISCSGSSSNIGSSSVSWYQQ |
| | | WVRQAPGKGLEWVGRIKSVTDGETTDYAAPVKGRF | LPGTAPKLLIYKNNQRPSGVPDRFSGSKSGTSASLAISG |
| | | TISRDDSKSTLYLQMNSLKTEDTAVYYCTSSFCCR | LRSEDEADYYCSTWDDSLSVRVFGGGTKLTVL (SEQ |
| | | GGSCPSHDTSYCGGQYKSYYYMDVWGKGTTVTVSS | ID NO: 1535) |
| | | (SEQ ID NO: 1341) | |
| 10 | AIP-196203 | EVQLVESGGALVKPGGSLRLSCAASGFTFSNAWMS | QSVLTQPPSASGTPGQRVTISCSGSSSNIGSSSVSWYQQ |
| | | WVRQAPGKGLEWVGRIKSVTDGETTDYAAPVKGRF | LPGTAPKLLIYKNNQRPSGVPDRFSGSKSGTSASLAISG |
| | | TISRDDSKSTLYLQMNSLKTEDTAVYYCTSSFCCR | LRSEDEADYYCSTWDDSLSVRVFGGGTKLTVL (SEQ |
| | | GGSCPSHDTSYCGGQYKSYYYMDVWGKGTTVTVSS | ID NO: 1536) |
| | | (SEQ ID NO: 1342) | |
| 11 | AIP-184151 | EVQLVESGGALVKPGGSLRLSCAASGFTFSRAWMS | QSVLTQPPSASGTPGQRVTISCSGSSSNIGSSSVSWYQQ |
| | | WVRQAPGKGLEWVGRIKSVTDGETTDYAAPVKGRF | LPGTAPKLLIYKNNQRPSGVPDRFSGSKSGTSASLAISG |
| | | TISRDDSKSTLYLQMNSLKTEDTAVYYCTSSFCCR | LRSEDEADYYCSTWDDSLSVRVFGGGTKLTVL (SEQ |
| | | GGSCPSHDTSYCGGQYKSYYYMDVWGKGTTVTVSS | ID NO: 1537) |
| | | (SEQ ID NO: 1343) | |
| 12 | AIP-128195 | EVQLVESGGALVKPGGSLRLSCAASGFTFSMAWMS | QSVLTQPPSASGTPGQRVTISCSGSSSNIGSSSVSWYQQ |
| | | WVRQAPGKGLEWVGRIKSVTDGETTDYAAPVKGRF | LPGTAPKLLIYKNNQRPSGVPDRFSGSKSGTSASLAISG |
| | | TISRDDSKSTLYLQMNSLKTEDTAVYYCTSSFCCR | LRSEDEADYYCSTWDDSLSVRVFGGGTKLTVL (SEQ |
| | | GGSCPSHDTSYCGGQYKSYYYMDVWGKGTTVTVSS | ID NO: 1538) |
| | | (SEQ ID NO: 1344) | |
| 13 | AIP-116579 | EVQLVESGGALVKPGGSLRLSCAASGFTFSAAWMS | QSVLTQPPSASGTPGQRVTISCSGSSSNIGSSSVSWYQQ |
| | | WVRQAPGKGLEWVGRIKSVTDGETTDYAAPVKGRF | LPGTAPKLLIYKNNQRPSGVPDRFSGSKSGTSASLAISG |
| | | TISRDDSKSTLYLQMNSLKTEDTAVYYCTSSFCCR | LRSEDEADYYCSTWDDSLSVRVFGGGTKLTVL (SEQ |
| | | GGSCPSHDTSYCGGQYKSYYYMDVWGKGTTVTVSS | ID NO: 1539) |
| | | (SEQ ID NO: 1345) | |
| 14 | AIP-192329 | EVQLVESGGALVKPGGSLRLSCAASGFTFSHAWMS | QSVLTQPPSASGTPGQRVTISCSGSSSNIGSSSVSWYQQ |
| | | WVRQAPGKGLEWVGRIKSVTDGETTDYAAPVKGRF | LPGTAPKLLIYKNNQRPSGVPDRFSGSKSGTSASLAISG |
| | | TISRDDSKSTLYLQMNSLKTEDTAVYYCTSSFCCR | LRSEDEADYYCSTWDDSLSVRVFGGGTKLTVL (SEQ |
| | | GGSCPSHDTSYCGGQYKSYYYMDVWGKGTTVTVSS | ID NO: 1540) |
| | | (SEQ ID NO: 1346) | |
| 15 | AIP-192329 | EVQLVESGGALVKPGGSLRLSCAASGFTFSHAWMS | QSVLTQPPSASGTPGQRVTISCSGSSSNIGSSSVSWYQQ |
| | | WVRQAPGKGLEWVGRIKSVTDGETTDYAAPVKGRF | LPGTAPKLLIYKNNQRPSGVPDRFSGSKSGTSASLAISG |
| | | TISRDDSKSTLYLQMNSLKTEDTAVYYCTSSFCCR | LRSEDEADYYCSTWDDSLSVRVFGGGTKLTVL (SEQ |
| | | GGSCPSHDTSYCGGQYKSYYYMDVWGKGTTVTVSS | ID NO: 1541) |
| | | (SEQ ID NO: 1347) | |
| 16 | AIP-197809 | EVQLVESGGALVKPGGSLRLSCAASGFTFSKAYMS | QSVLTQPPSASGTPGQRVTISCSGSSSNIGSSSVSWYQQ |
| | | WVRQAPGKGLEWVGRIKSVTDGETTDYAAPVKGRF | LPGTAPKLLIYKNNQRPSGVPDRFSGSKSGTSASLAISG |
| | | TISRDDSKSTLYLQMNSLKTEDTAVYYCTSSFCCR | LRSEDEADYYCSTWDDSLSVRVFGGGTKLTVL (SEQ |
| | | GGSCPSHDTSYCGGQYKSYYYMDVWGKGTTVTVSS | ID NO: 1542) |
| | | (SEQ ID NO: 1348) | |
| 17 | AIP-142489 | EVQLVESGGALVKPGGSLRLSCAASGFTFSKAWFS | QSVLTQPPSASGTPGQRVTISCSGSSSNIGSSSVSWYQQ |
| | | WVRQAPGKGLEWVGRIKSVTDGETTDYAAPVKGRF | LPGTAPKLLIYKNNQRPSGVPDRFSGSKSGTSASLAISG |
| | | TISRDDSKSTLYLQMNSLKTEDTAVYYCTSSFCCR | LRSEDEADYYCSTWDDSLSVRVFGGGTKLTVL (SEQ |
| | | GGSCPSHDTSYCGGQYKSYYYMDVWGKGTTVTVSS | ID NO: 1543) |
| | | (SEQ ID NO: 1349) | |
| 18 | AIP-148102 | EVQLVESGGALVKPGGSLRLSCAASGFTFSKAWMS | QSVLTQPPSASGTPGQRVTISCSGSSSNIGSSSVSWYQQ |
| | | WVRQAPGKGLEWVGRIQSVTDGETTDYAAPVKGRF | LPGTAPKLLIYKNNQRPSGVPDRFSGSKSGTSASLAISG |
| | | TISRDDSKSTLYLQMNSLKTEDTAVYYCTSSFCCR | LRSEDEADYYCSTWDDSLSVRVFGGGTKLTVL (SEQ |
| | | GGSCPSHDTSYCGGQYKSYYYMDVWGKGTTVTVSS | ID NO: 1544) |
| | | (SEQ ID NO: 1350) | |
| 19 | AIP-167726 | EVQLVESGGALVKPGGSLRLSCAASGFTFSKAWMS | QSVLTQPPSASGTPGQRVTISCSGSSSNIGSSSVSWYQQ |
| | | WVRQAPGKGLEWVGRIKAVTDGETTDYAAPVKGRF | LPGTAPKLLIYKNNQRPSGVPDRFSGSKSGTSASLAISG |
| | | TISRDDSKSTLYLQMNSLKTEDTAVYYCTSSFCCR | LRSEDEADYYCSTWDDSLSVRVFGGGTKLTVL (SEQ |
| | | GGSCPSHDTSYCGGQYKSYYYMDVWGKGTTVTVSS | ID NO: 1545) |
| | | (SEQ ID NO: 1351) | |
| 20 | AIP-199834 | EVQLVESGGALVKPGGSLRLSCAASGFTFSKAWMS | QSVLTQPPSASGTPGQRVTISCSGSSSNIGSSSVSWYQQ |
| | | WVRQAPGKGLEWVGRIKSATDGETTDYAAPVKGRF | LPGTAPKLLIYKNNQRPSGVPDRFSGSKSGTSASLAISG |
| | | TISRDDSKSTLYLQMNSLKTEDTAVYYCTSSFCCR | LRSEDEADYYCSTWDDSLSVRVFGGGTKLTVL (SEQ |
| | | GGSCPSHDTSYCGGQYKSYYYMDVWGKGTTVTVSS | ID NO: 1546) |
| | | (SEQ ID NO: 1352) | |
| 21 | AIP-143179 | EVQLVESGGALVKPGGSLRLSCAASGFTFSKAWMS | QSVLTQPPSASGTPGQRVTISCSGSSSNIGSSSVSWYQQ |
| | | WVRQAPGKGLEWVGRIKSNTDGETTDYAAPVKGRF | LPGTAPKLLIYKNNQRPSGVPDRFSGSKSGTSASLAISG |
| | | TISRDDSKSTLYLQMNSLKTEDTAVYYCTSSFCCR | LRSEDEADYYCSTWDDSLSVRVFGGGTKLTVL (SEQ |
| | | GGSCPSHDTSYCGGQYKSYYYMDVWGKGTTVTVSS | ID NO: 1547) |
| | | (SEQ ID NO: 1353) | |
| 22 | AIP-195587 | EVQLVESGGALVKPGGSLRLSCAASGFTFSKAWMS | QSVLTQPPSASGTPGQRVTISCSGSSSNIGSSSVSWYQQ |
| | | WVRQAPGKGLEWVGRIKSVHDGETTDYAAPVKGRF | LPGTAPKLLIYKNNQRPSGVPDRFSGSKSGTSASLAISG |
| | | TISRDDSKSTLYLQMNSLKTEDTAVYYCTSSFCCR | LRSEDEADYYCSTWDDSLSVRVFGGGTKLTVL (SEQ |
| | | GGSCPSHDTSYCGGQYKSYYYMDVWGKGTTVTVSS | ID NO: 1548) |
| | | (SEQ ID NO: 1354) | |
| 23 | AIP-153462 | EVQLVESGGALVKPGGSLRLSCAASGFTFSKAWMS | QSVLTQPPSASGTPGQRVTISCSGSSSNIGSSSVSWYQQ |
| | | WVRQAPGKGLEWVGRIKSVDDGETTDYAAPVKGRF | LPGTAPKLLIYKNNQRPSGVPDRFSGSKSGTSASLAISG |
| | | TISRDDSKSTLYLQMNSLKTEDTAVYYCTSSFCCR | LRSEDEADYYCSTWDDSLSVRVFGGGTKLTVL (SEQ |
| | | GGSCPSHDTSYCGGQYKSYYYMDVWGKGTTVTVSS | ID NO: 1549) |
| | | (SEQ ID NO: 1355) | |
| 24 | AIP-115363 | EVQLVESGGALVKPGGSLRLSCAASGFTFSKAWMS | QSVLTQPPSASGTPGQRVTISCSGSSSNIGSSSVSWYQQ |
| | | WVRQAPGKGLEWVGRIKSVQDGETTDYAAPVKGRF | LPGTAPKLLIYKNNQRPSGVPDRFSGSKSGTSASLAISG |
| | | TISRDDSKSTLYLQMNSLKTEDTAVYYCTSSFCCR | LRSEDEADYYCSTWDDSLSVRVFGGGTKLTVL (SEQ |
| | | GGSCPSHDTSYCGGQYKSYYYMDVWGKGTTVTVSS | ID NO: 1550) |
| | | (SEQ ID NO: 1356) | |
| 25 | AIP-151090 | EVQLVESGGALVKPGGSLRLSCAASGFTFSKAWMS | QSVLTQPPSASGTPGQRVTISCSGSSSNIGSSSVSWYQQ |
| | | WVRQAPGKGLEWVGRIKSVINGETTDYAAPVKGRF | LPGTAPKLLIYKNNQRPSGVPDRFSGSKSGTSASLAISG |
| | | TISRDDSKSTLYLQMNSLKTEDTAVYYCTSSFCCR | LRSEDEADYYCSTWDDSLSVRVFGGGTKLTVL (SEQ |
| | | GGSCPSHDTSYCGGQYKSYYYMDVWGKGTTVTVSS | ID NO: 1551) |
| | | (SEQ ID NO: 1357) | |
| 26 | AIP-168083 | EVQLVESGGALVKPGGSLRLSCAASGFTFSKAWMS | QSVLTQPPSASGTPGQRVTISCSGSSSNIGSSSVSWYQQ |
| | | WVRQAPGKGLEWVGRIKSVTDAETTDYAAPVKGRF | LPGTAPKLLIYKNNQRPSGVPDRFSGSKSGTSASLAISG |
| | | TISRDDSKSTLYLQMNSLKTEDTAVYYCTSSFCCR | LRSEDEADYYCSTWDDSLSVRVFGGGTKLTVL (SEQ |
| | | GGSCPSHDTSYCGGQYKSYYYMDVWGKGTTVTVSS | ID NO: 1552) |
| | | (SEQ ID NO: 1358) | |
| 27 | AIP-161082 | EVQLVESGGALVKPGGSLRLSCAASGFTFSKAWMS | QSVLTQPPSASGTPGQRVTISCSGSSSNIGSSSVSWYQQ |
| | | WVRQAPGKGLEWVGRIKSVTDGQTTDYAAPVKGRF | LPGTAPKLLIYKNNQRPSGVPDRFSGSKSGTSASLAISG |
| | | TISRDDSKSTLYLQMNSLKTEDTAVYYCTSSFCCR | LRSEDEADYYCSTWDDSLSVRVFGGGTKLTVL (SEQ |
| | | GGSCPSHDTSYCGGQYKSYYYMDVWGKGTTVTVSS | ID NO: 1553) |
| | | (SEQ ID NO: 1359) | |
| 28 | AIP-114196 | EVQLVESGGALVKPGGSLRLSCAASGFTFSKAWMS | QSVLTQPPSASGTPGQRVTISCSGSSSNIGSSSVSWYQQ |
| | | WVRQAPGKGLEWVGRIKSVTDGHTTDYAAPVKGRF | LPGTAPKLLIYKNNQRPSGVPDRFSGSKSGTSASLAISG |
| | | TISRDDSKSTLYLQMNSLKTEDTAVYYCTSSFCCR | LRSEDEADYYCSTWDDSLSVRVFGGGTKLTVL (SEQ |
| | | GGSCPSHDTSYCGGQYKSYYYMDVWGKGTTVTVSS | ID NO: 1554) |
| | | (SEQ ID NO: 1360) | |
| 29 | AIP-189338 | EVQLVESGGALVKPGGSLRLSCAASGFTFSKAWMS | QSVLTQPPSASGTPGQRVTISCSGSSSNIGSSSVSWYQQ |
| | | WVRQAPGKGLEWVGRIKSVTDGEQTDYAAPVKGRF | LPGTAPKLLIYKNNQRPSGVPDRFSGSKSGTSASLAISG |
| | | TISRDDSKSTLYLQMNSLKTEDTAVYYCTSSFCCR | LRSEDEADYYCSTWDDSLSVRVFGGGTKLTVL (SEQ |
| | | GGSCPSHDTSYCGGQYKSYYYMDVWGKGTTVTVSS | ID NO: 1555) |
| | | (SEQ ID NO: 1361) | |
| 30 | AIP-183190 | EVQLVESGGALVKPGGSLRLSCAASGFTFSKAWMS | QSVLTQPPSASGTPGQRVTISCSGSSSNIGSSSVSWYQQ |
| | | WVRQAPGKGLEWVGRIKSVTDGEATDYAAPVKGRF | LPGTAPKLLIYKNNQRPSGVPDRFSGSKSGTSASLAISG |
| | | TISRDDSKSTLYLQMNSLKTEDTAVYYCTSSFCCR | LRSEDEADYYCSTWDDSLSVRVFGGGTKLTVL (SEQ |
| | | GGSCPSHDTSYCGGQYKSYYYMDVWGKGTTVTVSS | ID NO: 1556) |
| | | (SEQ ID NO: 1362) | |
| 31 | AIP-110143 | EVQLVESGGALVKPGGSLRLSCAASGFTFSKAWMS | QSVLTQPPSASGTPGQRVTISCSGSSSNIGSSSVSWYQQ |
| | | WVRQAPGKGLEWVGRIKSVTDGETTDYASPVKGRF | LPGTAPKLLIYKNNQRPSGVPDRFSGSKSGTSASLAISG |
| | | TISRDDSKSTLYLQMNSLKTEDTAVYYCTSSFCCR | LRSEDEADYYCSTWDDSLSVRVFGGGTKLTVL (SEQ |
| | | GGSCPSHDTSYCGGQYKSYYYMDVWGKGTTVTVSS | ID NO: 1557) |
| | | (SEQ ID NO: 1363) | |
| 32 | AIP-147176 | EVQLVESGGALVKPGGSLRLSCAASGFTFSKAWMS | QSVLTQPPSASGTPGQRVTISCSGSSSNIGSSSVSWYQQ |
| | | WVRQAPGKGLEWVGRIKSVTDGETTDYAAPVQGRF | LPGTAPKLLIYKNNQRPSGVPDRFSGSKSGTSASLAISG |
| | | TISRDDSKSTLYLQMNSLKTEDTAVYYCTSSFCCR | LRSEDEADYYCSTWDDSLSVRVFGGGTKLTVL (SEQ |
| | | GGSCPSHDTSYCGGQYKSYYYMDVWGKGTTVTVSS | ID NO: 1558) |
| | | (SEQ ID NO: 1364) | |
| 33 | AIP-134312 | EVQLVESGGALVKPGGSLRLSCAASGFTFSKAWMS | QSVLTQPPSASGTPGQRVTISCSGSSSNIGSSSVSWYQQ |
| | | WVRQAPGKGLEWVGRIKSVTDGETTDYAAPVKGRF | LPGTAPKLLIYKNNQRPSGVPDRFSGSKSGTSASLAISG |
| | | TISRDDSKSTLYLQMNSLKTEDTAVYYCISSFCCR | LRSEDEADYYCSTWDDSLSVRVFGGGTKLTVL (SEQ |
| | | GGSCPSHDTSYCGGQYKSYYYMDVWGKGTTVTVSS | ID NO: 1559) |
| | | (SEQ ID NO: 1365) | |
| 34 | AIP-128243 | EVQLVESGGALVKPGGSLRLSCAASGFTFSKAWMS | QSVLTQPPSASGTPGQRVTISCSGSSSNIGSSSVSWYQQ |
| | | WVRQAPGKGLEWVGRIKSVTDGETTDYAAPVKGRF | LPGTAPKLLIYKNNQRPSGVPDRFSGSKSGTSASLAISG |
| | | TISRDDSKSTLYLQMNSLKTEDTAVYYCTTSFCCR | LRSEDEADYYCSTWDDSLSVRVFGGGTKLTVL (SEQ |
| | | GGSCPSHDTSYCGGQYKSYYYMDVWGKGTTVTVSS | ID NO: 1560) |
| | | (SEQ ID NO: 1366) | |
| 35 | AIP-156172 | EVQLVESGGALVKPGGSLRLSCAASGFTFSKAWMS | QSVLTQPPSASGTPGQRVTISCSGSSSNIGSSSVSWYQQ |
| | | WVRQAPGKGLEWVGRIKSVTDGETTDYAAPVKGRF | LPGTAPKLLIYKNNQRPSGVPDRFSGSKSGTSASLAISG |
| | | TISRDDSKSTLYLQMNSLKTEDTAVYYCTSPFCCR | LRSEDEADYYCSTWDDSLSVRVFGGGTKLTVL (SEQ |
| | | GGSCPSHDTSYCGGQYKSYYYMDVWGKGTTVTVSS | ID NO: 1561) |
| | | (SEQ ID NO: 1367) | |
| 36 | AIP-147389 | EVQLVESGGALVKPGGSLRLSCAASGFTFSKAWMS | QSVLTQPPSASGTPGQRVTISCSGSSSNIGSSSVSWYQQ |
| | | WVRQAPGKGLEWVGRIKSVTDGETTDYAAPVKGRF | LPGTAPKLLIYKNNQRPSGVPDRFSGSKSGTSASLAISG |
| | | TISRDDSKSTLYLQMNSLKTEDTAVYYCTSAFCCR | LRSEDEADYYCSTWDDSLSVRVFGGGTKLTVL (SEQ |
| | | GGSCPSHDTSYCGGQYKSYYYMDVWGKGTTVTVSS | ID NO: 1562) |
| | | (SEQ ID NO: 1368) | |
| 37 | AIP-124314 | EVQLVESGGALVKPGGSLRLSCAASGFTFSKAWMS | QSVLTQPPSASGTPGQRVTISCSGSSSNIGSSSVSWYQQ |
| | | WVRQAPGKGLEWVGRIKSVTDGETTDYAAPVKGRF | LPGTAPKLLIYKNNQRPSGVPDRFSGSKSGTSASLAISG |
| | | TISRDDSKSTLYLQMNSLKTEDTAVYYCTSSYCCR | LRSEDEADYYCSTWDDSLSVRVFGGGTKLTVL (SEQ |
| | | GGSCPSHDTSYCGGQYKSYYYMDVWGKGTTVTVSS | ID NO: 1563) |
| | | (SEQ ID NO: 1369) | |
| 38 | AIP-185291 | EVQLVESGGALVKPGGSLRLSCAASGFTFSKAWMS | QSVLTQPPSASGTPGQRVTISCSGSSSNIGSSSVSWYQQ |
| | | WVRQAPGKGLEWVGRIKSVTDGETTDYAAPVKGRF | LPGTAPKLLIYKNNQRPSGVPDRFSGSKSGTSASLAISG |
| | | TISRDDSKSTLYLQMNSLKTEDTAVYYCTSSFCCL | LRSEDEADYYCSTWDDSLSVRVFGGGTKLTVL (SEQ |
| | | GGSCPSHDTSYCGGQYKSYYYMDVWGKGTTVTVSS | ID NO: 1564) |
| | | (SEQ ID NO: 1370) | |
| 39 | AIP-135247 | EVQLVESGGALVKPGGSLRLSCAASGFTFSKAWMS | QSVLTQPPSASGTPGQRVTISCSGSSSNIGSSSVSWYQQ |
| | | WVRQAPGKGLEWVGRIKSVTDGETTDYAAPVKGRF | LPGTAPKLLIYKNNQRPSGVPDRFSGSKSGTSASLAISG |
| | | TISRDDSKSTLYLQMNSLKTEDTAVYYCTSSFCCH | LRSEDEADYYCSTWDDSLSVRVFGGGTKLTVL (SEQ |
| | | GGSCPSHDTSYCGGQYKSYYYMDVWGKGTTVTVSS | ID NO: 1565) |
| | | (SEQ ID NO: 1371) | |
| 40 | AIP-113513 | EVQLVESGGALVKPGGSLRLSCAASGFTFSKAWMS | QSVLTQPPSASGTPGQRVTISCSGSSSNIGSSSVSWYQQ |
| | | WVRQAPGKGLEWVGRIKSVTDGETTDYAAPVKGRF | LPGTAPKLLIYKNNQRPSGVPDRFSGSKSGTSASLAISG |
| | | TISRDDSKSTLYLQMNSLKTEDTAVYYCTSSFCCQ | LRSEDEADYYCSTWDDSLSVRVFGGGTKLTVL (SEQ |
| | | GGSCPSHDTSYCGGQYKSYYYMDVWGKGTTVTVSS | ID NO: 1566) |
| | | (SEQ ID NO: 1372) | |
| 41 | AIP-102299 | EVQLVESGGALVKPGGSLRLSCAASGFTFSKAWMS | QSVLTQPPSASGTPGQRVTISCSGSSSNIGSSSVSWYQQ |
| | | WVRQAPGKGLEWVGRIKSVTDGETTDYAAPVKGRF | LPGTAPKLLIYKNNQRPSGVPDRFSGSKSGTSASLAISG |
| | | TISRDDSKSTLYLQMNSLKTEDTAVYYCTSSFCCR | LRSEDEADYYCSTWDDSLSVRVFGGGTKLTVL (SEQ |
| | | SGSCPSHDTSYCGGQYKSYYYMDVWGKGTTVTVSS | ID NO: 1567) |
| | | (SEQ ID NO: 1373) | |
| 42 | AIP-179097 | EVQLVESGGALVKPGGSLRLSCAASGFTFSKAWMS | QSVLTQPPSASGTPGQRVTISCSGSSSNIGSSSVSWYQQ |
| | | WVRQAPGKGLEWVGRIKSVTDGETTDYAAPVKGRF | LPGTAPKLLIYKNNQRPSGVPDRFSGSKSGTSASLAISG |
| | | TISRDDSKSTLYLQMNSLKTEDTAVYYCTSSFCCR | LRSEDEADYYCSTWDDSLSVRVFGGGTKLTVL (SEQ |
| | | GASCPSHDTSYCGGQYKSYYYMDVWGKGTTVTVSS | ID NO: 1568) |
| | | (SEQ ID NO: 1374) | |
| 43 | AIP-109343 | EVQLVESGGALVKPGGSLRLSCAASGFTFSKAWMS | QSVLTQPPSASGTPGQRVTISCSGSSSNIGSSSVSWYQQ |
| | | WVRQAPGKGLEWVGRIKSVTDGETTDYAAPVKGRF | LPGTAPKLLIYKNNQRPSGVPDRFSGSKSGTSASLAISG |
| | | TISRDDSKSTLYLQMNSLKTEDTAVYYCTSSFCCR | LRSEDEADYYCSTWDDSLSVRVFGGGTKLTVL (SEQ |
| | | GKSCPSHDTSYCGGQYKSYYYMDVWGKGTTVTVSS | ID NO: 1569) |
| | | (SEQ ID NO: 1375) | |
| 44 | AIP-119622 | EVQLVESGGALVKPGGSLRLSCAASGFTFSKAWMS | QSVLTQPPSASGTPGQRVTISCSGSSSNIGSSSVSWYQQ |
| | | WVRQAPGKGLEWVGRIKSVTDGETTDYAAPVKGRF | LPGTAPKLLIYKNNQRPSGVPDRFSGSKSGTSASLAISG |
| | | TISRDDSKSTLYLQMNSLKTEDTAVYYCTSSFCCR | LRSEDEADYYCSTWDDSLSVRVFGGGTKLTVL (SEQ |
| | | GNSCPSHDTSYCGGQYKSYYYMDVWGKGTTVTVSS | ID NO: 1570) |
| | | (SEQ ID NO: 1376) | |
| 45 | AIP-191735 | EVQLVESGGALVKPGGSLRLSCAASGFTFSKAWMS | QSVLTQPPSASGTPGQRVTISCSGSSSNIGSSSVSWYQQ |
| | | WVRQAPGKGLEWVGRIKSVTDGETTDYAAPVKGRF | LPGTAPKLLIYKNNQRPSGVPDRFSGSKSGTSASLAISG |
| | | TISRDDSKSTLYLQMNSLKTEDTAVYYCTSSFCCR | LRSEDEADYYCSTWDDSLSVRVFGGGTKLTVL (SEQ |
| | | GGNCPSHDTSYCGGQYKSYYYMDVWGKGTTVTVSS | ID NO: 1571) |
| | | (SEQ ID NO: 1377) | |
| 46 | AIP-157078 | EVQLVESGGALVKPGGSLRLSCAASGFTFSKAWMS | QSVLTQPPSASGTPGQRVTISCSGSSSNIGSSSVSWYQQ |
| | | WVRQAPGKGLEWVGRIKSVTDGETTDYAAPVKGRF | LPGTAPKLLIYKNNQRPSGVPDRFSGSKSGTSASLAISG |
| | | TISRDDSKSTLYLQMNSLKTEDTAVYYCTSSFCCR | LRSEDEADYYCSTWDDSLSVRVFGGGTKLTVL (SEQ |
| | | GGQCPSHDTSYCGGQYKSYYYMDVWGKGTTVTVSS | ID NO: 1572) |
| | | (SEQ ID NO: 1378) | |
| 47 | AIP-153475 | EVQLVESGGALVKPGGSLRLSCAASGFTFSKAWMS | QSVLTQPPSASGTPGQRVTISCSGSSSNIGSSSVSWYQQ |
| | | WVRQAPGKGLEWVGRIKSVTDGETTDYAAPVKGRF | LPGTAPKLLIYKNNQRPSGVPDRFSGSKSGTSASLAISG |
| | | TISRDDSKSTLYLQMNSLKTEDTAVYYCTSSFCCR | LRSEDEADYYCSTWDDSLSVRVFGGGTKLTVL (SEQ |
| | | GGACPSHDTSYCGGQYKSYYYMDVWGKGTTVTVSS | ID NO: 1573) |
| | | (SEQ ID NO: 1379) | |
| 48 | AIP-133650 | EVQLVESGGALVKPGGSLRLSCAASGFTFSKAWMS | QSVLTQPPSASGTPGQRVTISCSGSSSNIGSSSVSWYQQ |
| | | WVRQAPGKGLEWVGRIKSVTDGETTDYAAPVKGRF | LPGTAPKLLIYKNNQRPSGVPDRFSGSKSGTSASLAISG |
| | | TISRDDSKSTLYLQMNSLKTEDTAVYYCTSSFCCR | LRSEDEADYYCSTWDDSLSVRVFGGGTKLTVL (SEQ |
| | | GGSCASHDTSYCGGQYKSYYYMDVWGKGTTVTVSS | ID NO: 1574) |
| | | (SEQ ID NO: 1380) | |
| 49 | AIP-190915 | EVQLVESGGALVKPGGSLRLSCAASGFTFSKAWMS | QSVLTQPPSASGTPGQRVTISCSGSSSNIGSSSVSWYQQ |
| | | WVRQAPGKGLEWVGRIKSVTDGETTDYAAPVKGRF | LPGTAPKLLIYKNNQRPSGVPDRFSGSKSGTSASLAISG |
| | | TISRDDSKSTLYLQMNSLKTEDTAVYYCTSSFCCR | LRSEDEADYYCSTWDDSLSVRVFGGGTKLTVL (SEQ |
| | | GGSCLSHDTSYCGGQYKSYYYMDVWGKGTTVTVSS | ID NO: 1575) |
| | | (SEQ ID NO: 1381) | |
| 50 | AIP-105241 | EVQLVESGGALVKPGGSLRLSCAASGFTFSKAWMS | QSVLTQPPSASGTPGQRVTISCSGSSSNIGSSSVSWYQQ |
| | | WVRQAPGKGLEWVGRIKSVTDGETTDYAAPVKGRF | LPGTAPKLLIYKNNQRPSGVPDRFSGSKSGTSASLAISG |
| | | TISRDDSKSTLYLQMNSLKTEDTAVYYCTSSFCCR | LRSEDEADYYCSTWDDSLSVRVFGGGTKLTVL (SEQ |
| | | GGSCPAHDTSYCGGQYKSYYYMDVWGKGTTVTVSS | ID NO: 1576) |
| | | (SEQ ID NO: 1382) | |
| 51 | AIP-167400 | EVQLVESGGALVKPGGSLRLSCAASGFTFSKAWMS | QSVLTQPPSASGTPGQRVTISCSGSSSNIGSSSVSWYQQ |
| | | WVRQAPGKGLEWVGRIKSVTDGETTDYAAPVKGRF | LPGTAPKLLIYKNNQRPSGVPDRFSGSKSGTSASLAISG |
| | | TISRDDSKSTLYLQMNSLKTEDTAVYYCTSSFCCR | LRSEDEADYYCSTWDDSLSVRVFGGGTKLTVL (SEQ |
| | | GGSCPNHDTSYCGGQYKSYYYMDVWGKGTTVTVSS | ID NO: 1577) |
| | | (SEQ ID NO: 1383) | |
| 52 | AIP-109729 | EVQLVESGGALVKPGGSLRLSCAASGFTFSKAWMS | QSVLTQPPSASGTPGQRVTISCSGSSSNIGSSSVSWYQQ |
| | | WVRQAPGKGLEWVGRIKSVTDGETTDYAAPVKGRF | LPGTAPKLLIYKNNQRPSGVPDRFSGSKSGTSASLAISG |
| | | TISRDDSKSTLYLQMNSLKTEDTAVYYCTSSFCCR | LRSEDEADYYCSTWDDSLSVRVFGGGTKLTVL (SEQ |
| | | GGSCPSSDTSYCGGQYKSYYYMDVWGKGTTVTVSS | ID NO: 1578) |
| | | (SEQ ID NO: 1384) | |
| 53 | AIP-151709 | EVQLVESGGALVKPGGSLRLSCAASGFTFSKAWMS | QSVLTQPPSASGTPGQRVTISCSGSSSNIGSSSVSWYQQ |
| | | WVRQAPGKGLEWVGRIKSVTDGETTDYAAPVKGRF | LPGTAPKLLIYKNNQRPSGVPDRFSGSKSGTSASLAISG |
| | | TISRDDSKSTLYLQMNSLKTEDTAVYYCTSSFCCR | LRSEDEADYYCSTWDDSLSVRVFGGGTKLTVL (SEQ |
| | | GGSCPSQDTSYCGGQYKSYYYMDVWGKGTTVTVSS | ID NO: 1579) |
| | | (SEQ ID NO: 1385) | |
| 54 | AIP-137169 | EVQLVESGGALVKPGGSLRLSCAASGFTFSKAWMS | QSVLTQPPSASGTPGQRVTISCSGSSSNIGSSSVSWYQQ |
| | | WVRQAPGKGLEWVGRIKSVTDGETTDYAAPVKGRF | LPGTAPKLLIYKNNQRPSGVPDRFSGSKSGTSASLAISG |
| | | TISRDDSKSTLYLQMNSLKTEDTAVYYCTSSFCCR | LRSEDEADYYCSTWDDSLSVRVFGGGTKLTVL (SEQ |
| | | GGSCPSHETSYCGGQYKSYYYMDVWGKGTTVTVSS | ID NO: 1580) |
| | | (SEQ ID NO: 1386) | |
| 55 | AIP-199616 | EVQLVESGGALVKPGGSLRLSCAASGFTFSKAWMS | QSVLTQPPSASGTPGQRVTISCSGSSSNIGSSSVSWYQQ |
| | | WVRQAPGKGLEWVGRIKSVTDGETTDYAAPVKGRF | LPGTAPKLLIYKNNQRPSGVPDRFSGSKSGTSASLAISG |
| | | TISRDDSKSTLYLQMNSLKTEDTAVYYCTSSFCCR | LRSEDEADYYCSTWDDSLSVRVFGGGTKLTVL (SEQ |
| | | GGSCPSHDQSYCGGQYKSYYYMDVWGKGTTVTVSS | ID NO: 1581) |
| | | (SEQ ID NO: 1387) | |
| 56 | AIP-189296 | EVQLVESGGALVKPGGSLRLSCAASGFTFSKAWMS | QSVLTQPPSASGTPGQRVTISCSGSSSNIGSSSVSWYQQ |
| | | WVRQAPGKGLEWVGRIKSVTDGETTDYAAPVKGRF | LPGTAPKLLIYKNNQRPSGVPDRFSGSKSGTSASLAISG |
| | | TISRDDSKSTLYLQMNSLKTEDTAVYYCTSSFCCR | LRSEDEADYYCSTWDDSLSVRVFGGGTKLTVL (SEQ |
| | | GGSCPSHDTSMCGGQYKSYYYMDVWGKGTTVTVSS | ID NO: 1582) |
| | | (SEQ ID NO: 1388) | |
| 57 | AIP-152283 | EVQLVESGGALVKPGGSLRLSCAASGFTFSKAWMS | QSVLTQPPSASGTPGQRVTISCSGSSSNIGSSSVSWYQQ |
| | | WVRQAPGKGLEWVGRIKSVTDGETTDYAAPVKGRF | LPGTAPKLLIYKNNQRPSGVPDRFSGSKSGTSASLAISG |
| | | TISRDDSKSTLYLQMNSLKTEDTAVYYCTSSFCCR | LRSEDEADYYCSTWDDSLSVRVFGGGTKLTVL (SEQ |
| | | GGSCPSHDTSYCAGQYKSYYYMDVWGKGTTVTVSS | ID NO: 1583) |
| | | (SEQ ID NO: 1389) | |
| 58 | AIP-136628 | EVQLVESGGALVKPGGSLRLSCAASGFTFSKAWMS | QSVLTQPPSASGTPGQRVTISCSGSSSNIGSSSVSWYQQ |
| | | WVRQAPGKGLEWVGRIKSVTDGETTDYAAPVKGRF | LPGTAPKLLIYKNNQRPSGVPDRFSGSKSGTSASLAISG |
| | | TISRDDSKSTLYLQMNSLKTEDTAVYYCTSSFCCR | LRSEDEADYYCSTWDDSLSVRVFGGGTKLTVL (SEQ |
| | | GGSCPSHDTSYCNGQYKSYYYMDVWGKGTTVTVSS | ID NO: 1584) |
| | | (SEQ ID NO: 1390) | |
| 59 | AIP-100340 | EVQLVESGGALVKPGGSLRLSCAASGFTFSKAWMS | QSVLTQPPSASGTPGQRVTISCSGSSSNIGSSSVSWYQQ |
| | | WVRQAPGKGLEWVGRIKSVTDGETTDYAAPVKGRF | LPGTAPKLLIYKNNQRPSGVPDRFSGSKSGTSASLAISG |
| | | TISRDDSKSTLYLQMNSLKTEDTAVYYCTSSFCCR | LRSEDEADYYCSTWDDSLSVRVFGGGTKLTVL (SEQ |
| | | GGSCPSHDTSYCGNQYKSYYYMDVWGKGTTVTVSS | ID NO: 1585) |
| | | (SEQ ID NO: 1391) | |
| 60 | AIP-166959 | EVQLVESGGALVKPGGSLRLSCAASGFTFSKAWMS | QSVLTQPPSASGTPGQRVTISCSGSSSNIGSSSVSWYQQ |
| | | WVRQAPGKGLEWVGRIKSVTDGETTDYAAPVKGRF | LPGTAPKLLIYKNNQRPSGVPDRFSGSKSGTSASLAISG |
| | | TISRDDSKSTLYLQMNSLKTEDTAVYYCTSSFCCR | LRSEDEADYYCSTWDDSLSVRVFGGGTKLTVL (SEQ |
| | | GGSCPSHDTSYCGAQYKSYYYMDVWGKGTTVTVSS | ID NO: 1586) |
| | | (SEQ ID NO: 1392) | |
| 61 | AIP-190362 | EVQLVESGGALVKPGGSLRLSCAASGFTFSKAWMS | QSVLTQPPSASGTPGQRVTISCSGSSSNIGSSSVSWYQQ |
| | | WVRQAPGKGLEWVGRIKSVTDGETTDYAAPVKGRF | LPGTAPKLLIYKNNQRPSGVPDRFSGSKSGTSASLAISG |
| | | TISRDDSKSTLYLQMNSLKTEDTAVYYCTSSFCCR | LRSEDEADYYCSTWDDSLSVRVFGGGTKLTVL (SEQ |
| | | GGSCPSHDTSYCGGSYKSYYYMDVWGKGTTVTVSS | ID NO: 1587) |
| | | (SEQ ID NO: 1393) | |
| 62 | AIP-101601 | EVQLVESGGALVKPGGSLRLSCAASGFTFSKAWMS | QSVLTQPPSASGTPGQRVTISCSGSSSNIGSSSVSWYQQ |
| | | WVRQAPGKGLEWVGRIKSVTDGETTDYAAPVKGRF | LPGTAPKLLIYKNNQRPSGVPDRFSGSKSGTSASLAISG |
| | | TISRDDSKSTLYLQMNSLKTEDTAVYYCTSSFCCR | LRSEDEADYYCSTWDDSLSVRVFGGGTKLTVL (SEQ |
| | | GGSCPSHDTSYCGGYYKSYYYMDVWGKGTTVTVSS | ID NO: 1588) |
| | | (SEQ ID NO: 1394) | |
| 63 | AIP-159023 | EVQLVESGGALVKPGGSLRLSCAASGFTFSKAWMS | QSVLTQPPSASGTPGQRVTISCSGSSSNIGSSSVSWYQQ |
| | | WVRQAPGKGLEWVGRIKSVTDGETTDYAAPVKGRF | LPGTAPKLLIYKNNQRPSGVPDRFSGSKSGTSASLAISG |
| | | TISRDDSKSTLYLQMNSLKTEDTAVYYCTSSFCCR | LRSEDEADYYCSTWDDSLSVRVFGGGTKLTVL (SEQ |
| | | GGSCPSHDTSYCGGQFKSYYYMDVWGKGTTVTVSS | ID NO: 1589) |
| | | (SEQ ID NO: 1395) | |
| 64 | AIP-146871 | EVQLVESGGALVKPGGSLRLSCAASGFTFSKAWMS | QSVLTQPPSASGTPGQRVTISCSGSSSNIGSSSVSWYQQ |
| | | WVRQAPGKGLEWVGRIKSVTDGETTDYAAPVKGRF | LPGTAPKLLIYKNNQRPSGVPDRFSGSKSGTSASLAISG |
| | | TISRDDSKSTLYLQMNSLKTEDTAVYYCTSSFCCR | LRSEDEADYYCSTWDDSLSVRVFGGGTKLTVL (SEQ |
| | | GGSCPSHDTSYCGGQYPSYYYMDVWGKGTTVTVSS | ID NO: 1590) |
| | | (SEQ ID NO: 1396) | |
| 65 | AIP-170053 | EVQLVESGGALVKPGGSLRLSCAASGFTFSKAWMS | QSVLTQPPSASGTPGQRVTISCSGSSSNIGSSSVSWYQQ |
| | | WVRQAPGKGLEWVGRIKSVTDGETTDYAAPVKGRF | LPGTAPKLLIYKNNQRPSGVPDRFSGSKSGTSASLAISG |
| | | TISRDDSKSTLYLQMNSLKTEDTAVYYCTSSFCCR | LRSEDEADYYCSTWDDSLSVRVFGGGTKLTVL (SEQ |
| | | GGSCPSHDTSYCGGQYASYYYMDVWGKGTTVTVSS | ID NO: 1591) |
| | | (SEQ ID NO: 1397) | |
| 66 | AIP-199483 | EVQLVESGGALVKPGGSLRLSCAASGFTFSKAWMS | QSVLTQPPSASGTPGQRVTISCSGSSSNIGSSSVSWYQQ |
| | | WVRQAPGKGLEWVGRIKSVTDGETTDYAAPVKGRF | LPGTAPKLLIYKNNQRPSGVPDRFSGSKSGTSASLAISG |
| | | TISRDDSKSTLYLQMNSLKTEDTAVYYCTSSFCCR | LRSEDEADYYCSTWDDSLSVRVFGGGTKLTVL (SEQ |
| | | GGSCPSHDTSYCGGQYQSYYYMDVWGKGTTVTVSS | ID NO: 1592) |
| | | (SEQ ID NO: 1398) | |
| 67 | AIP-161048 | EVQLVESGGALVKPGGSLRLSCAASGFTFSKAWMS | QSVLTQPPSASGTPGQRVTISCSGSSSNIGSSSVSWYQQ |
| | | WVRQAPGKGLEWVGRIKSVTDGETTDYAAPVKGRF | LPGTAPKLLIYKNNQRPSGVPDRFSGSKSGTSASLAISG |
| | | TISRDDSKSTLYLQMNSLKTEDTAVYYCTSSFCCR | LRSEDEADYYCSTWDDSLSVRVFGGGTKLTVL (SEQ |
| | | GGSCPSHDTSYCGGQYKDYYYMDVWGKGTTVTVSS | ID NO: 1593) |
| | | (SEQ ID NO: 1399) | |
| 68 | AIP-162041 | EVQLVESGGALVKPGGSLRLSCAASGFTFSKAWMS | QSVLTQPPSASGTPGQRVTISCSGSSSNIGSSSVSWYQQ |
| | | WVRQAPGKGLEWVGRIKSVTDGETTDYAAPVKGRF | LPGTAPKLLIYKNNQRPSGVPDRFSGSKSGTSASLAISG |
| | | TISRDDSKSTLYLQMNSLKTEDTAVYYCTSSFCCR | LRSEDEADYYCSTWDDSLSVRVFGGGTKLTVL (SEQ |
| | | GGSCPSHDTSYCGGQYKSFYYMDVWGKGTTVTVSS | ID NO: 1594) |
| | | (SEQ ID NO: 1400) | |
| 69 | AIP-197886 | EVQLVESGGALVKPGGSLRLSCAASGFTFSKAWMS | QSVLTQPPSASGTPGQRVTISCSGSSSNIGSSSVSWYQQ |
| | | WVRQAPGKGLEWVGRIKSVTDGETTDYAAPVKGRF | LPGTAPKLLIYKNNQRPSGVPDRFSGSKSGTSASLAISG |
| | | TISRDDSKSTLYLQMNSLKTEDTAVYYCTSSFCCR | LRSEDEADYYCSTWDDSLSVRVFGGGTKLTVL (SEQ |
| | | GGSCPSHDTSYCGGQYKSYFYMDVWGKGTTVTVSS | ID NO: 1595) |
| | | (SEQ ID NO: 1401) | |
| 70 | AIP-183133 | EVQLVESGGALVKPGGSLRLSCAASGFTFSKAWMS | QSVLTQPPSASGTPGQRVTISCSGSSSNIGSSSVSWYQQ |
| | | WVRQAPGKGLEWVGRIKSVTDGETTDYAAPVKGRF | LPGTAPKLLIYKNNQRPSGVPDRFSGSKSGTSASLAISG |
| | | TISRDDSKSTLYLQMNSLKTEDTAVYYCTSSFCCR | LRSEDEADYYCSTWDDSLSVRVFGGGTKLTVL (SEQ |
| | | GGSCPSHDTSYCGGQYKSYYWMDVWGKGTTVTVSS | ID NO: 1596) |
| | | (SEQ ID NO: 1402) | |
| 71 | AIP-191470 | EVQLVESGGALVKPGGSLRLSCAASGFTFSKAWMS | QSVLTQPPSASGTPGQRVTISCSGSSSNIGSSSVSWYQQ |
| | | WVRQAPGKGLEWVGRIKSVTDGETTDYAAPVKGRF | LPGTAPKLLIYKNNQRPSGVPDRFSGSKSGTSASLAISG |
| | | TISRDDSKSTLYLQMNSLKTEDTAVYYCTSSFCCR | LRSEDEADYYCSTWDDSLSVRVFGGGTKLTVL (SEQ |
| | | GGSCPSHDTSYCGGQYKSYYLMDVWGKGTTVTVSS | ID NO: 1597) |
| | | (SEQ ID NO: 1403) | |
| 72 | AIP-151167 | EVQLVESGGALVKPGGSLRLSCAASGFTFSKAWMS | QSVLTQPPSASGTPGQRVTISCSGSSSNIGSSSVSWYQQ |
| | | WVRQAPGKGLEWVGRIKSVTDGETTDYAAPVKGRF | LPGTAPKLLIYKNNQRPSGVPDRFSGSKSGTSASLAISG |
| | | TISRDDSKSTLYLQMNSLKTEDTAVYYCTSSFCCR | LRSEDEADYYCSTWDDSLSVRVFGGGTKLTVL (SEQ |
| | | GGSCPSHDTSYCGGQYKSYYYVDVWGKGTTVTVSS | ID NO: 1598) |
| | | (SEQ ID NO: 1404) | |
| 73 | AIP-106633 | EVQLVESGGALVKPGGSLRLSCAASGFTFSKAWMS | QSVLTQPPSASGTPGQRVTISCSGSSSNIGSSSVSWYQQ |
| | | WVRQAPGKGLEWVGRIKSVTDGETTDYAAPVKGRF | LPGTAPKLLIYKNNQRPSGVPDRFSGSKSGTSASLAISG |
| | | TISRDDSKSTLYLQMNSLKTEDTAVYYCTSSFCCR | LRSEDEADYYCSTWDDSLSVRVFGGGTKLTVL (SEQ |
| | | GGSCPSHDTSYCGGQYKSYYYFDVWGKGTTVTVSS | ID NO: 1599) |
| | | (SEQ ID NO: 1405) | |
| 74 | AIP-102624 | EVQLVESGGALVKPGGSLRLSCAASGFTFSKAWMS | QSVLTQPPSASGTPGQRVTISCSGSSSNIGSSSVSWYQQ |
| | | WVRQAPGKGLEWVGRIKSVTDGETTDYAAPVKGRF | LPGTAPKLLIYKNNQRPSGVPDRFSGSKSGTSASLAISG |
| | | TISRDDSKSTLYLQMNSLKTEDTAVYYCTSSFCCR | LRSEDEADYYCSTWDDSLSVRVFGGGTKLTVL (SEQ |
| | | GGSCPSHDTSYCGGQYKSYYYMNVWGKGTTVTVSS | ID NO: 1600) |
| | | (SEQ ID NO: 1406) | |
| 75 | AIP-109484 | EVQLVESGGALVKPGGSLRLSCAASGFTFSKAWMS | QSVLTQPPSASGTPGQRVTISCSGSSSNIGSSSVSWYQQ |
| | | WVRQAPGKGLEWVGRIKSVTDGETTDYAAPVKGRF | LPGTAPKLLIYKNNQRPSGVPDRFSGSKSGTSASLAISG |
| | | TISRDDSKSTLYLQMNSLKTEDTAVYYCTSSFCCR | LRSEDEADYYCSTWDDSLSVRVFGGGTKLTVL (SEQ |
| | | GGSCPSHDTSYCGGQYKSYYYMDIWGKGTTVTVSS | ID NO: 1601) |
| | | (SEQ ID NO: 1407) | |
| 76 | AIP-164754 | EVQLVESGGALVKPGGSLRLSCAASGFTFSKAWMS | QSVLTQPPSASGTPGQRVTISCSGSSSNIGSSSVSWYQQ |
| | | WVRQAPGKGLEWVGRIKSVTDGETTDYAAPVKGRF | LPGTAPKLLIYKNNQRPSGVPDRFSGSKSGTSASLAISG |
| | | TISRDDSKSTLYLQMNSLKTEDTAVYYCTSSFCCR | LRSEDEADYYCSTWDDSLSVRVFGGGTKLTVL (SEQ |
| | | GGSCPSHDTSYCGGQYKSYYYMDPWGKGTTVTVSS | ID NO: 1602) |
| | | (SEQ ID NO: 1408) | |
| 77 | AIP-169676 | EVQLVESGGALVKPGGSLRLSCAASGFTFSKAWMS | QSVLTQPPSASGTPGQRVTISCSGSSSNIGSSSVSWYQQ |
| | | WVRQAPGKGLEWVGRIKSVTDGETTDYAAPVKGRF | LPGTAPKLLIYKNNQRPSGVPDRFSGSKSGTSASLAISG |
| | | TISRDDSKSTLYLQMNSLKTEDTAVYYCTSSFCCR | LRSEDEADYYCSTWDDSLSVRVFGGGTKLTVL (SEQ |
| | | GGSCPSHDTSYCGGQFKDYYYMDVWGKGTTVTVSS | ID NO: 1603) |
| | | (SEQ ID NO: 1409) | |
| 78 | AIP-177584 | EVQLVESGGALVKPGGSLRLSCAASGFTFSKAWMS | QSVLTQPPSASGTPGQRVTISCSGSSSNIGSSSVSWYQQ |
| | | WVRQAPGKGLEWVGRIKSVTDGETTDYAAPVKGRF | LPGTAPKLLIYKNNQRPSGVPDRFSGSKSGTSASLAISG |
| | | TISRDDSKSTLYLQMNSLKTEDTAVYYCTSSFCCR | LRSEDEADYYCSTWDDSLSVRVFGGGTKLTVL (SEQ |
| | | GGSCPSHDTSYCGGQSKQYYYMDVWGKGTTVTVSS | ID NO: 1604) |
| | | (SEQ ID NO: 1410) | |
| 79 | AIP-174676 | EVQLVESGGALVKPGGSLRLSCAASGFTFSKAWMS | QSVLTQPPSASGTPGQRVTISCSGSSSNIGSSSVSWYQQ |
| | | WVRQAPGKGLEWVGRIKSVTDGETTDYAAPVKGRF | LPGTAPKLLIYKNNQRPSGVPDRFSGSKSGTSASLAISG |
| | | TISRDDSKSTLYLQMNSLKTEDTAVYYCTSSFCCR | LRSEDEADYYCSTWDDSLSVRVFGGGTKLTVL (SEQ |
| | | GGSCPSHDTSYCGGQSKKYYYMDVWGKGTTVTVSS | ID NO: 1605) |
| | | (SEQ ID NO: 1411) | |
| 80 | AIP-120546 | EVQLVESGGALVKPGGSLRLSCAASGFTFSKAWMS | QSVLTQPPSASGTPGQRVTISCSGSSSNIGSSSVSWYQQ |
| | | WVRQAPGKGLEWVGRIKSVTDGETTDYAAPVKGRF | LPGTAPKLLIYKNNQRPSGVPDRFSGSKSGTSASLAISG |
| | | TISRDDSKSTLYLQMNSLKTEDTAVYYCTSSFSCR | LRSEDEADYYCSTWDDSLSVRVFGGGTKLTVL (SEQ |
| | | GGSCPSHDTSYSGGQYKSYYYMDVWGKGTTVTVSS | ID NO: 1606) |
| | | (SEQ ID NO: 1412) | |
| 81 | AIP-186435 | EVQLVESGGALVKPGGSLRLSCAASGFTFSKAWMS | QSVLTQPPSASGTPGQRVTISCSGSSSNIGSSSVSWYQQ |
| | | WVRQAPGKGLEWVGRIKSVTDGETTDYAAPVKGRF | LPGTAPKLLIYKNNQRPSGVPDRFSGSKSGTSASLAISG |
| | | TISRDDSKSTLYLQMNSLKTEDTAVYYCTSSFACR | LRSEDEADYYCSTWDDSLSVRVFGGGTKLTVL (SEQ |
| | | GGSCPSHDTSYVGGQYKSYYYMDVWGKGTTVTVSS | ID NO: 1607) |
| | | (SEQ ID NO: 1413) | |
| 82 | AIP-171074 | EVQLVESGGALVKPGGSLRLSCAASGFTFSKAWMS | QSVLTQPPSASGTPGQRVTISCSGSSSNIGSSSVSWYQQ |
| | | WVRQAPGKGLEWVGRIKSVTDGETTDYAAPVKGRF | LPGTAPKLLIYKNNQRPSGVPDRFSGSKSGTSASLAISG |
| | | TISRDDSKSTLYLQMNSLKTEDTAVYYCTSSFCCR | LRSEDEADYYCSTWDDSLSVRVFGGGTKLTVL (SEQ |
| | | GNSCPAHDTSYCGGQYPSYYYMDVWGKGTTVTVSS | ID NO: 1608) |
| | | (SEQ ID NO: 1414) | |
| 83 | AIP-163039 | EVQLVESGGALVKPGGSLRLSCAASGFTFSKAWMS | QSVLTQPPSASGTPGQRVTISCSGSSSNIGSSSVSWYQQ |
| | | WVRQAPGKGLEWVGRIKSVTDGETTDYAAPVKGRF | LPGTAPKLLIYKNNQRPSGVPDRFSGSKSGTSASLAISG |
| | | TISRDDSKSTLYLQMNSLKTEDTAVYYCTSSYCCL | LRSEDEADYYCSTWDDSLSVRVFGGGTKLTVL (SEQ |
| | | GGSCPSHDTSYCGGSYKSYYYMDVWGKGTTVTVSS | ID NO: 1609) |
| | | (SEQ ID NO: 1415) | |
| 84 | AIP-147652 | EVQLVESGGALVKPGGSLRLSCAASGFTFSKAWMS | QSVLTQPPSASGTPGQRVTISCSGSSSNIGSSSVSWYQQ |
| | | WVRQAPGKGLEWVGRIKSVTDGETTDYAAPVKGRF | LPGTAPKLLIYKNNQRPSGVPDRFSGSKSGTSASLAISG |
| | | TISRDDSKSTLYLQMNSLKTEDTAVYYCTSSFCCR | LRSEDEADYYCSTWDDSLSVRVFGGGTKLTVL (SEQ |
| | | GKSCPSHDNSYCGGQYASYYYMDVWGKGTTVTVSS | ID NO: 1610) |
| | | (SEQ ID NO: 1416) | |
| 85 | AIP-182061 | EVQLVESGGALVKPGGSLRLSCAASGFTFSKAWMS | QSVLTQPPSASGTPGQRVTISCSGSSSNIGSSSVSWYQQ |
| | | WVRQAPGKGLEWVGRIKSVTDGETTDYAAPVKGRF | LPGTAPKLLIYKNNQRPSGVPDRFSGSKSGTSASLAISG |
| | | TISRDDSKSTLYLQMNSLKTEDTAVYYCTSSYCCR | LRSEDEADYYCSTWDDSLSVRVFGGGTKLTVL (SEQ |
| | | GGSCPSHDTSYCGGQFKSYYYMDPWGKGTTVTVSS | ID NO: 1611) |
| | | (SEQ ID NO: 1417) | |
| 86 | AIP-172643 | EVQLVESGGALVKPGGSLRLSCAASGFTFSKAWMS | QSVLTQPPSASGTPGQRVTISCSGSSSNIGSSSVSWYQQ |
| | | WVRQAPGKGLEWVGRIKSVTDGETTDYAAPVKGRF | LPGTAPKLLIYKNNQRPSGVPDRFSGSKSGTSASLAISG |
| | | TISRDDSKSTLYLQMNSLKTEDTAVYYCTSTFCCR | LRSEDEADYYCSTWDDSLSVRVFGGGTKLTVL (SEQ |
| | | GGSCLSHDTSYCGGQYKSYYWMDVWGKGTTVTVSS | ID NO: 1612) |
| | | (SEQ ID NO: 1418) | |
| 87 | AIP-171912 | EVQLVESGGALVKPGGSLRLSCAASGFDFSKAWMS | QSVLTQPPSASGTPGQRVTISCTGSSSNIGSSSVSWYQQ |
| | | WVRQAPGKGLEWVGRIKSVTDGQTTDYAAPVKGRF | LPGTAPKLLIYKNNQRPSGVPDRFSGSKSGTSASLAISG |
| | | TISRDDSKSTLYLQMNSLKTEDTAVYYCTSSFCCR | LRSEDEADYYCSTWDDSLSVRVFGGGTKLTVL (SEQ |
| | | GGSCPSHDTSYCGGQYKSYYYMDVWGKGTTVTVSS | ID NO: 1613) |
| | | (SEQ ID NO: 1419) | |
| 88 | AIP-167833 | EVQLVESGGALVKPGGSLRLSCAASGFTFAKAWMS | QSVLTQPPSASGTPGQRVTISCSGSSTNIGSSSVSWYQQ |
| | | WVRQAPGKGLEWVGRIKSVTDGETTDYAAPVKGRF | LPGTAPKLLIYKNNYRPSGVPDRFSGSKSGTSASLAISG |
| | | TISRDDSKSTLYLQMNSLKTEDTAVYYCTSSFCCR | LRSEDEADYYCSTWDDSLSVRVFGGGTKLTVL (SEQ |
| | | GGSCPSHDTSYCGGQYKSYYYMDVWGKGTTVTVSS | ID NO: 1614) |
| | | (SEQ ID NO: 1420) | |
| 89 | AIP-145518 | EVQLVESGGALVKPGGSLRLSCAASGFDASKAWFT | QSVLTQPPSASGTPGQRVTISCSGSSSNIGSSSVSWYQQ |
| | | WVRQAPGKGLEWVGRIKSVTDGETTDYAAPVKGRF | LPGTAPKLLIYKNNQRPSGVPDRFSGSKSGTSASLAISG |
| | | TISRDDSKSTLYLQMNSLKTEDTAVYYCTSSFCCR | LRSEDEADYYCSTWDDSLSVRVFGGGTKLTVL (SEQ |
| | | GGSCPSHDTSYCGGQYKSYYYMDVWGKGTTVTVSS | ID NO: 1615) |
| | | (SEQ ID NO: 1421) | |
| 90 | AIP-143155 | EVQLVESGGALVKPGGSLRLSCAASGFTFSKAWMS | QSVLTQPPSASGTPGQRVTISCTGSSSNIGSSSVSWYQQ |
| | | WVRQAPGKGLEWVGRIKSVTDGETTDYAAPVKGRF | LPGTAPKLLIYKNNQRPSGVPDRFSGSKSGTSASLAISG |
| | | TISRDDSKSTLYLQMNSLKTEDTAVYYCTSSFCCR | LRSEDEADYYCSTWDDSLSVRVFGGGTKLTVL (SEQ |
| | | GGSCPSHDTSYCGGQYKSYYYMDVWGKGTTVTVSS | ID NO: 1616) |
| | | (SEQ ID NO: 1422) | |
| 91 | AIP-119664 | EVQLVESGGALVKPGGSLRLSCAASGFTFSKAWMS | QSVLTQPPSASGTPGQRVTISCSGASSNIGSSSVSWYQQ |
| | | WVRQAPGKGLEWVGRIKSVTDGETTDYAAPVKGRF | LPGTAPKLLIYKNNQRPSGVPDRFSGSKSGTSASLAISG |
| | | TISRDDSKSTLYLQMNSLKTEDTAVYYCTSSFCCR | LRSEDEADYYCSTWDDSLSVRVFGGGTKLTVL (SEQ |
| | | GGSCPSHDTSYCGGQYKSYYYMDVWGKGTTVTVSS | ID NO: 1617) |
| | | (SEQ ID NO: 1423) | |
| 92 | AIP-190526 | EVQLVESGGALVKPGGSLRLSCAASGFTFSKAWMS | QSVLTQPPSASGTPGQRVTISCSGSPSNIGSSSVSWYQQ |
| | | WVRQAPGKGLEWVGRIKSVTDGETTDYAAPVKGRF | LPGTAPKLLIYKNNQRPSGVPDRFSGSKSGTSASLAISG |
| | | TISRDDSKSTLYLQMNSLKTEDTAVYYCTSSFCCR | LRSEDEADYYCSTWDDSLSVRVFGGGTKLTVL (SEQ |
| | | GGSCPSHDTSYCGGQYKSYYYMDVWGKGTTVTVSS | ID NO: 1618) |
| | | (SEQ ID NO: 1424) | |
| 93 | AIP-114403 | EVQLVESGGALVKPGGSLRLSCAASGFTFSKAWMS | QSVLTQPPSASGTPGQRVTISCSGSKSNIGSSSVSWYQQ |
| | | WVRQAPGKGLEWVGRIKSVTDGETTDYAAPVKGRF | LPGTAPKLLIYKNNQRPSGVPDRFSGSKSGTSASLAISG |
| | | TISRDDSKSTLYLQMNSLKTEDTAVYYCTSSFCCR | LRSEDEADYYCSTWDDSLSVRVFGGGTKLTVL (SEQ |
| | | GGSCPSHDTSYCGGQYKSYYYMDVWGKGTTVTVSS | ID NO: 1619) |
| | | (SEQ ID NO: 1425) | |
| 94 | AIP-156760 | EVQLVESGGALVKPGGSLRLSCAASGFTFSKAWMS | QSVLTQPPSASGTPGQRVTISCSGSSTNIGSSSVSWYQQ |
| | | WVRQAPGKGLEWVGRIKSVTDGETTDYAAPVKGRF | LPGTAPKLLIYKNNQRPSGVPDRFSGSKSGTSASLAISG |
| | | TISRDDSKSTLYLQMNSLKTEDTAVYYCTSSFCCR | LRSEDEADYYCSTWDDSLSVRVFGGGTKLTVL (SEQ |
| | | GGSCPSHDTSYCGGQYKSYYYMDVWGKGTTVTVSS | ID NO: 1620) |
| | | (SEQ ID NO: 1426) | |
| 95 | AIP-103803 | EVQLVESGGALVKPGGSLRLSCAASGFTFSKAWMS | QSVLTQPPSASGTPGQRVTISCSGSSSDIGSSSVSWYQQ |
| | | WVRQAPGKGLEWVGRIKSVTDGETTDYAAPVKGRF | LPGTAPKLLIYKNNQRPSGVPDRFSGSKSGTSASLAISG |
| | | TISRDDSKSTLYLQMNSLKTEDTAVYYCTSSFCCR | LRSEDEADYYCSTWDDSLSVRVFGGGTKLTVL (SEQ |
| | | GGSCPSHDTSYCGGQYKSYYYMDVWGKGTTVTVSS | ID NO: 1621) |
| | | (SEQ ID NO: 1427) | |
| 96 | AIP-182722 | EVQLVESGGALVKPGGSLRLSCAASGFTFSKAWMS | QSVLTQPPSASGTPGQRVTISCSGSSSNIQSSSVSWYQQ |
| | | WVRQAPGKGLEWVGRIKSVTDGETTDYAAPVKGRF | LPGTAPKLLIYKNNQRPSGVPDRFSGSKSGTSASLAISG |
| | | TISRDDSKSTLYLQMNSLKTEDTAVYYCTSSFCCR | LRSEDEADYYCSTWDDSLSVRVFGGGTKLTVL (SEQ |
| | | GGSCPSHDTSYCGGQYKSYYYMDVWGKGTTVTVSS | ID NO: 1622) |
| | | (SEQ ID NO: 1428) | |
| 97 | AIP-195588 | EVQLVESGGALVKPGGSLRLSCAASGFTFSKAWMS | QSVLTQPPSASGTPGQRVTISCSGSSSNIGHSSVSWYQQ |
| | | WVRQAPGKGLEWVGRIKSVTDGETTDYAAPVKGRF | LPGTAPKLLIYKNNQRPSGVPDRFSGSKSGTSASLAISG |
| | | TISRDDSKSTLYLQMNSLKTEDTAVYYCTSSFCCR | LRSEDEADYYCSTWDDSLSVRVFGGGTKLTVL (SEQ |
| | | GGSCPSHDTSYCGGQYKSYYYMDVWGKGTTVTVSS | ID NO: 1623) |
| | | (SEQ ID NO: 1429) | |
| 98 | AIP-145722 | EVQLVESGGALVKPGGSLRLSCAASGFTFSKAWMS | QSVLTQPPSASGTPGQRVTISCSGSSSNIGSTSVSWYQQ |
| | | WVRQAPGKGLEWVGRIKSVTDGETTDYAAPVKGRF | LPGTAPKLLIYKNNQRPSGVPDRFSGSKSGTSASLAISG |
| | | TISRDDSKSTLYLQMNSLKTEDTAVYYCTSSFCCR | LRSEDEADYYCSTWDDSLSVRVFGGGTKLTVL (SEQ |
| | | GGSCPSHDTSYCGGQYKSYYYMDVWGKGTTVTVSS | ID NO: 1624) |
| | | (SEQ ID NO: 1430) | |
| 99 | AIP-178251 | EVQLVESGGALVKPGGSLRLSCAASGFTFSKAWMS | QSVLTQPPSASGTPGQRVTISCSGSSSNIGSNSVSWYQQ |
| | | WVRQAPGKGLEWVGRIKSVTDGETTDYAAPVKGRF | LPGTAPKLLIYKNNQRPSGVPDRFSGSKSGTSASLAISG |
| | | TISRDDSKSTLYLQMNSLKTEDTAVYYCTSSFCCR | LRSEDEADYYCSTWDDSLSVRVFGGGTKLTVL (SEQ |
| | | GGSCPSHDTSYCGGQYKSYYYMDVWGKGTTVTVSS | ID NO: 1625) |
| | | (SEQ ID NO: 1431) | |
| 100 | AIP-116142 | EVQLVESGGALVKPGGSLRLSCAASGFTFSKAWMS | QSVLTQPPSASGTPGQRVTISCSGSSSNIGSASVSWYQQ |
| | | WVRQAPGKGLEWVGRIKSVTDGETTDYAAPVKGRF | LPGTAPKLLIYKNNQRPSGVPDRFSGSKSGTSASLAISG |
| | | TISRDDSKSTLYLQMNSLKTEDTAVYYCTSSFCCR | LRSEDEADYYCSTWDDSLSVRVFGGGTKLTVL (SEQ |
| | | GGSCPSHDTSYCGGQYKSYYYMDVWGKGTTVTVSS | ID NO: 1626) |
| | | (SEQ ID NO: 1432) | |
| 101 | AIP-183350 | EVQLVESGGALVKPGGSLRLSCAASGFTFSKAWMS | QSVLTQPPSASGTPGQRVTISCSGSSSNIGSSTVSWYQQ |
| | | WVRQAPGKGLEWVGRIKSVTDGETTDYAAPVKGRF | LPGTAPKLLIYKNNQRPSGVPDRFSGSKSGTSASLAISG |
| | | TISRDDSKSTLYLQMNSLKTEDTAVYYCTSSFCCR | LRSEDEADYYCSTWDDSLSVRVFGGGTKLTVL (SEQ |
| | | GGSCPSHDTSYCGGQYKSYYYMDVWGKGTTVTVSS | ID NO: 1627) |
| | | (SEQ ID NO: 1433) | |
| 102 | AIP-127108 | EVQLVESGGALVKPGGSLRLSCAASGFTFSKAWMS | QSVLTQPPSASGTPGQRVTISCSGSSSNIGSSAVSWYQQ |
| | | WVRQAPGKGLEWVGRIKSVTDGETTDYAAPVKGRF | LPGTAPKLLIYKNNQRPSGVPDRFSGSKSGTSASLAISG |
| | | TISRDDSKSTLYLQMNSLKTEDTAVYYCTSSFCCR | LRSEDEADYYCSTWDDSLSVRVFGGGTKLTVL (SEQ |
| | | GGSCPSHDTSYCGGQYKSYYYMDVWGKGTTVTVSS | ID NO: 1628) |
| | | (SEQ ID NO: 1434) | |
| 103 | AIP-128147 | EVQLVESGGALVKPGGSLRLSCAASGFTFSKAWMS | QSVLTQPPSASGTPGQRVTISCSGSSSNIGSSYVSWYQQ |
| | | WVRQAPGKGLEWVGRIKSVTDGETTDYAAPVKGRF | LPGTAPKLLIYKNNQRPSGVPDRFSGSKSGTSASLAISG |
| | | TISRDDSKSTLYLQMNSLKTEDTAVYYCTSSFCCR | LRSEDEADYYCSTWDDSLSVRVFGGGTKLTVL (SEQ |
| | | GGSCPSHDTSYCGGQYKSYYYMDVWGKGTTVTVSS | ID NO: 1629) |
| | | (SEQ ID NO: 1435) | |
| 104 | AIP-109510 | EVQLVESGGALVKPGGSLRLSCAASGFTFSKAWMS | QSVLTQPPSASGTPGQRVTISCSGSSSNIGSSSTSWYQQ |
| | | WVRQAPGKGLEWVGRIKSVTDGETTDYAAPVKGRF | LPGTAPKLLIYKNNQRPSGVPDRFSGSKSGTSASLAISG |
| | | TISRDDSKSTLYLQMNSLKTEDTAVYYCTSSFCCR | LRSEDEADYYCSTWDDSLSVRVFGGGTKLTVL (SEQ |
| | | GGSCPSHDTSYCGGQYKSYYYMDVWGKGTTVTVSS | ID NO: 1630) |
| | | (SEQ ID NO: 1436) | |
| 105 | AIP-104086 | EVQLVESGGALVKPGGSLRLSCAASGFTFSKAWMS | QSVLTQPPSASGTPGQRVTISCSGSSSNIGSSSVAWYQQ |
| | | WVRQAPGKGLEWVGRIKSVTDGETTDYAAPVKGRF | LPGTAPKLLIYKNNQRPSGVPDRFSGSKSGTSASLAISG |
| | | TISRDDSKSTLYLQMNSLKTEDTAVYYCTSSFCCR | LRSEDEADYYCSTWDDSLSVRVFGGGTKLTVL (SEQ |
| | | GGSCPSHDTSYCGGQYKSYYYMDVWGKGTTVTVS | ID NO: 1631) |
| | | (SEQ ID NO: 1437) | |
| 106 | AIP-143132 | EVQLVESGGALVKPGGSLRLSCAASGFTFSKAWMS | QSVLTQPPSASGTPGQRVTISCSGSSSNIGSSSVTWYQQ |
| | | WVRQAPGKGLEWVGRIKSVTDGETTDYAAPVKGRF | LPGTAPKLLIYKNNQRPSGVPDRFSGSKSGTSASLAISG |
| | | TISRDDSKSTLYLQMNSLKTEDTAVYYCTSSFCCR | LRSEDEADYYCSTWDDSLSVRVFGGGTKLTVL (SEQ |
| | | GGSCPSHDTSYCGGQYKSYYYMDVWGKGTTVTVSS | ID NO: 1632) |
| | | (SEQ ID NO: 1438) | |
| 107 | AIP-169636 | EVQLVESGGALVKPGGSLRLSCAASGFTFSKAWMS | QSVLTQPPSASGTPGQRVTISCSGSSSNIGSSSVSWYQQ |
| | | WVRQAPGKGLEWVGRIKSVTDGETTDYAAPVKGRF | LPGTAPKLLIYRNNQRPSGVPDRFSGSKSGTSASLAISG |
| | | TISRDDSKSTLYLQMNSLKTEDTAVYYCTSSFCCR | LRSEDEADYYCSTWDDSLSVRVFGGGTKLTVL (SEQ |
| | | GGSCPSHDTSYCGGQYKSYYYMDVWGKGTTVTVSS | ID NO: 1633) |
| | | (SEQ ID NO: 1439) | |
| 108 | AIP-152243 | EVQLVESGGALVKPGGSLRLSCAASGFTFSKAWMS | QSVLTQPPSASGTPGQRVTISCSGSSSNIGSSSVSWYQQ |
| | | WVRQAPGKGLEWVGRIKSVTDGETTDYAAPVKGRF | LPGTAPKLLIYNNNQRPSGVPDRFSGSKSGTSASLAISG |
| | | TISRDDSKSTLYLQMNSLKTEDTAVYYCTSSFCCR | LRSEDEADYYCSTWDDSLSVRVFGGGTKLTVL (SEQ |
| | | GGSCPSHDTSYCGGQYKSYYYMDVWGKGTTVTVSS | ID NO: 1634) |
| | | (SEQ ID NO: 1440) | |
| 109 | AIP-138776 | EVQLVESGGALVKPGGSLRLSCAASGFTFSKAWMS | QSVLTQPPSASGTPGQRVTISCSGSSSNIGSSSVSWYQQ |
| | | WVRQAPGKGLEWVGRIKSVTDGETTDYAAPVKGRF | LPGTAPKLLIYMNNQRPSGVPDRFSGSKSGTSASLAISG |
| | | TISRDDSKSTLYLQMNSLKTEDTAVYYCTSSFCCR | LRSEDEADYYCSTWDDSLSVRVFGGGTKLTVL (SEQ |
| | | GGSCPSHDTSYCGGQYKSYYYMDVWGKGTTVTVSS | ID NO: 1635) |
| | | (SEQ ID NO: 1441) | |
| 110 | AIP-103817 | EVQLVESGGALVKPGGSLRLSCAASGFTFSKAWMS | QSVLTQPPSASGTPGQRVTISCSGSSSNIGSSSVSWYQQ |
| | | WVRQAPGKGLEWVGRIKSVTDGETTDYAAPVKGRF | LPGTAPKLLIYANNQRPSGVPDRFSGSKSGTSASLAISG |
| | | TISRDDSKSTLYLQMNSLKTEDTAVYYCTSSFCCR | LRSEDEADYYCSTWDDSLSVRVFGGGTKLTVL (SEQ |
| | | GGSCPSHDTSYCGGQYKSYYYMDVWGKGTTVTVSS | ID NO: 1636) |
| | | (SEQ ID NO: 1442) | |
| 111 | AIP-130491 | EVQLVESGGALVKPGGSLRLSCAASGFTFSKAWMS | QSVLTQPPSASGTPGQRVTISCSGSSSNIGSSSVSWYQQ |
| | | WVRQAPGKGLEWVGRIKSVTDGETTDYAAPVKGRF | LPGTAPKLLIYHNNQRPSGVPDRFSGSKSGTSASLAISG |
| | | TISRDDSKSTLYLQMNSLKTEDTAVYYCTSSFCCR | LRSEDEADYYCSTWDDSLSVRVFGGGTKLTVL (SEQ |
| | | GGSCPSHDTSYCGGQYKSYYYMDVWGKGTTVTVSS | ID NO: 1637) |
| | | (SEQ ID NO: 1443) | |
| 112 | AIP-188155 | EVQLVESGGALVKPGGSLRLSCAASGFTFSKAWMS | QSVLTQPPSASGTPGQRVTISCSGSSSNIGSSSVSWYQQ |
| | | WVRQAPGKGLEWVGRIKSVTDGETTDYAAPVKGRF | LPGTAPKLLIYKDNQRPSGVPDRFSGSKSGTSASLAISG |
| | | TISRDDSKSTLYLQMNSLKTEDTAVYYCTSSFCCR | LRSEDEADYYCSTWDDSLSVRVFGGGTKLTVL (SEQ |
| | | GGSCPSHDTSYCGGQYKSYYYMDVWGKGTTVTVSS | ID NO: 1638) |
| | | (SEQ ID NO: 1444) | |
| 113 | AIP-167246 | EVQLVESGGALVKPGGSLRLSCAASGFTFSKAWMS | QSVLTQPPSASGTPGQRVTISCSGSSSNIGSSSVSWYQQ |
| | | WVRQAPGKGLEWVGRIKSVTDGETTDYAAPVKGRF | LPGTAPKLLIYKNTQRPSGVPDRFSGSKSGTSASLAISG |
| | | TISRDDSKSTLYLQMNSLKTEDTAVYYCTSSFCCR | LRSEDEADYYCSTWDDSLSVRVFGGGTKLTVL (SEQ |
| | | GGSCPSHDTSYCGGQYKSYYYMDVWGKGTTVTVSS | ID NO: 1639) |
| | | (SEQ ID NO: 1445) | |
| 114 | AIP-106139 | EVQLVESGGALVKPGGSLRLSCAASGFTFSKAWMS | QSVLTQPPSASGTPGQRVTISCSGSSSNIGSSSVSWYQQ |
| | | WVRQAPGKGLEWVGRIKSVTDGETTDYAAPVKGRF | LPGTAPKLLIYKNNYRPSGVPDRFSGSKSGTSASLAISG |
| | | TISRDDSKSTLYLQMNSLKTEDTAVYYCTSSFCCR | LRSEDEADYYCSTWDDSLSVRVFGGGTKLTVL (SEQ |
| | | GGSCPSHDTSYCGGQYKSYYYMDVWGKGTTVTVSS | ID NO: 1640) |
| | | (SEQ ID NO: 1446) | |
| 115 | AIP-198351 | EVQLVESGGALVKPGGSLRLSCAASGFTFSKAWMS | QSVLTQPPSASGTPGQRVTISCSGSSSNIGSSSVSWYQQ |
| | | WVRQAPGKGLEWVGRIKSVTDGETTDYAAPVKGRF | LPGTAPKLLIYKNNARPSGVPDRFSGSKSGTSASLAISG |
| | | TISRDDSKSTLYLQMNSLKTEDTAVYYCTSSFCCR | LRSEDEADYYCSTWDDSLSVRVFGGGTKLTVL (SEQ |
| | | GGSCPSHDTSYCGGQYKSYYYMDVWGKGTTVTVSS | ID NO: 1641) |
| | | (SEQ ID NO: 1447) | |
| 116 | AIP-159326 | EVQLVESGGALVKPGGSLRLSCAASGFTFSKAWMS | QSVLTQPPSASGTPGQRVTISCSGSSSNIGSSSVSWYQQ |
| | | WVRQAPGKGLEWVGRIKSVTDGETTDYAAPVKGRF | LPGTAPKLLIYKNNLRPSGVPDRFSGSKSGTSASLAISG |
| | | TISRDDSKSTLYLQMNSLKTEDTAVYYCTSSFCCR | LRSEDEADYYCSTWDDSLSVRVFGGGTKLTVL (SEQ |
| | | GGSCPSHDTSYCGGQYKSYYYMDVWGKGTTVTVSS | ID NO: 1642) |
| | | (SEQ ID NO: 1448) | |
| 117 | AIP-192275 | EVQLVESGGALVKPGGSLRLSCAASGFTFSKAWMS | QSVLTQPPSASGTPGQRVTISCSGSSSNIGSSSVSWYQQ |
| | | WVRQAPGKGLEWVGRIKSVTDGETTDYAAPVKGRF | LPGTAPKLLIYKNNQQPSGVPDRFSGSKSGTSASLAISG |
| | | TISRDDSKSTLYLQMNSLKTEDTAVYYCTSSFCCR | LRSEDEADYYCSTWDDSLSVRVFGGGTKLTVL (SEQ |
| | | GGSCPSHDTSYCGGQYKSYYYMDVWGKGTTVTVSS | ID NO: 1643) |
| | | (SEQ ID NO: 1449) | |
| 118 | AIP-190761 | EVQLVESGGALVKPGGSLRLSCAASGFTFSKAWMS | QSVLTQPPSASGTPGQRVTISCSGSSSNIGSSSVSWYQQ |
| | | WVRQAPGKGLEWVGRIKSVTDGETTDYAAPVKGRF | LPGTAPKLLIYKNNQRASGVPDRFSGSKSGTSASLAISG |
| | | TISRDDSKSTLYLQMNSLKTEDTAVYYCTSSFCCR | LRSEDEADYYCSTWDDSLSVRVFGGGTKLTVL (SEQ |
| | | GGSCPSHDTSYCGGQYKSYYYMDVWGKGTTVTVSS | ID NO: 1644) |
| | | (SEQ ID NO: 1450) | |
| 119 | AIP-166832 | EVQLVESGGALVKPGGSLRLSCAASGFTFSKAWMS | QSVLTQPPSASGTPGQRVTISCSGSSSNIGSSSVSWYQQ |
| | | WVRQAPGKGLEWVGRIKSVTDGETTDYAAPVKGRF | LPGTAPKLLIYKNNQRPYGVPDRFSGSKSGTSASLAISG |
| | | TISRDDSKSTLYLQMNSLKTEDTAVYYCTSSFCCR | LRSEDEADYYCSTWDDSLSVRVFGGGTKLTVL (SEQ |
| | | GGSCPSHDTSYCGGQYKSYYYMDVWGKGTTVTVSS | ID NO: 1645) |
| | | (SEQ ID NO: 1451) | |
| 120 | AIP-148062 | EVQLVESGGALVKPGGSLRLSCAASGFTFSKAWMS | QSVLTQPPSASGTPGQRVTISCSGSSSNIGSSSVSWYQQ |
| | | WVRQAPGKGLEWVGRIKSVTDGETTDYAAPVKGRF | LPGTAPKLLIYKNNQRPLGVPDRFSGSKSGTSASLAISG |
| | | TISRDDSKSTLYLQMNSLKTEDTAVYYCTSSFCCR | LRSEDEADYYCSTWDDSLSVRVFGGGTKLTVL (SEQ |
| | | GGSCPSHDTSYCGGQYKSYYYMDVWGKGTTVTVSS | ID NO: 1646) |
| | | (SEQ ID NO: 1452) | |
| 121 | AIP-129145 | EVQLVESGGALVKPGGSLRLSCAASGFTFSKAWMS | QSVLTQPPSASGTPGQRVTISCSGSSSNIGSSSVSWYQQ |
| | | WVRQAPGKGLEWVGRIKSVTDGETTDYAAPVKGRF | LPGTAPKLLIYKNNQRPSGVPDRFSGSKSGTSASLAISG |
| | | TISRDDSKSTLYLQMNSLKTEDTAVYYCTSSFCCR | LRSEDEADYYCATWDDSLSVRVFGGGTKLTVL (SEQ |
| | | GGSCPSHDTSYCGGQYKSYYYMDVWGKGTTVTVSS | ID NO: 1647) |
| | | (SEQ ID NO: 1453) | |
| 122 | AIP-111240 | EVQLVESGGALVKPGGSLRLSCAASGFTFSKAWMS | QSVLTQPPSASGTPGQRVTISCSGSSSNIGSSSVSWYQQ |
| | | WVRQAPGKGLEWVGRIKSVTDGETTDYAAPVKGRF | LPGTAPKLLIYKNNQRPSGVPDRFSGSKSGTSASLAISG |
| | | TISRDDSKSTLYLQMNSLKTEDTAVYYCTSSFCCR | LRSEDEADYYCSSWDDSLSVRVFGGGTKLTVL (SEQ |
| | | GGSCPSHDTSYCGGQYKSYYYMDVWGKGTTVTVSS | ID NO: 1648) |
| | | (SEQ ID NO: 1454) | |
| 123 | AIP-190749 | EVQLVESGGALVKPGGSLRLSCAASGFTFSKAWMS | QSVLTQPPSASGTPGQRVTISCSGSSSNIGSSSVSWYQQ |
| | | WVRQAPGKGLEWVGRIKSVTDGETTDYAAPVKGRF | LPGTAPKLLIYKNNQRPSGVPDRFSGSKSGTSASLAISG |
| | | TISRDDSKSTLYLQMNSLKTEDTAVYYCTSSFCCR | LRSEDEADYYCSTFDDSLSVRVFGGGTKLTVL (SEQ |
| | | GGSCPSHDTSYCGGQYKSYYYMDVWGKGTTVTVSS | ID NO: 1649) |
| | | (SEQ ID NO: 1455) | |
| 124 | AIP-153888 | EVQLVESGGALVKPGGSLRLSCAASGFTFSKAWMS | QSVLTQPPSASGTPGQRVTISCSGSSSNIGSSSVSWYQQ |
| | | WVRQAPGKGLEWVGRIKSVTDGETTDYAAPVKGRF | LPGTAPKLLIYKNNQRPSGVPDRFSGSKSGTSASLAISG |
| | | TISRDDSKSTLYLQMNSLKTEDTAVYYCTSSFCCR | LRSEDEADYYCSTWDNSLSVRVFGGGTKLTVL (SEQ |
| | | GGSCPSHDTSYCGGQYKSYYYMDVWGKGTTVTVSS | ID NO: 1650) |
| | | (SEQ ID NO: 1456) | |
| 125 | AIP-130915 | EVQLVESGGALVKPGGSLRLSCAASGFTFSKAWMS | QSVLTQPPSASGTPGQRVTISCSGSSSNIGSSSVSWYQQ |
| | | WVRQAPGKGLEWVGRIKSVTDGETTDYAAPVKGRF | LPGTAPKLLIYKNNQRPSGVPDRFSGSKSGTSASLAISG |
| | | TISRDDSKSTLYLQMNSLKTEDTAVYYCTSSFCCR | LRSEDEADYYCSTWDDQLSVRVFGGGTKLTVL (SEQ |
| | | GGSCPSHDTSYCGGQYKSYYYMDVWGKGTTVTVSS | ID NO: 1651) |
| | | (SEQ ID NO: 1457) | |
| 126 | AIP-109048 | EVQLVESGGALVKPGGSLRLSCAASGFTFSKAWMS | QSVLTQPPSASGTPGQRVTISCSGSSSNIGSSSVSWYQQ |
| | | WVRQAPGKGLEWVGRIKSVTDGETTDYAAPVKGRF | LPGTAPKLLIYKNNQRPSGVPDRFSGSKSGTSASLAISG |
| | | TISRDDSKSTLYLQMNSLKTEDTAVYYCTSSFCCR | LRSEDEADYYCSTWDDALSVRVFGGGTKLTVL (SEQ |
| | | GGSCPSHDTSYCGGQYKSYYYMDVWGKGTTVTVSS | ID NO: 1652) |
| | | (SEQ ID NO: 1458) | |
| 127 | AIP-170569 | EVQLVESGGALVKPGGSLRLSCAASGFTFSKAWMS | QSVLTQPPSASGTPGQRVTISCSGSSSNIGSSSVSWYQQ |
| | | WVRQAPGKGLEWVGRIKSVTDGETTDYAAPVKGRF | LPGTAPKLLIYKNNQRPSGVPDRFSGSKSGTSASLAISG |
| | | TISRDDSKSTLYLQMNSLKTEDTAVYYCTSSFCCR | LRSEDEADYYCSTWDDDLSVRVFGGGTKLTVL (SEQ |
| | | GGSCPSHDTSYCGGQYKSYYYMDVWGKGTTVTVSS | ID NO: 1653) |
| | | (SEQ ID NO: 1459) | |
| 128 | AIP-154873 | EVQLVESGGALVKPGGSLRLSCAASGFTFSKAWMS | QSVLTQPPSASGTPGQRVTISCSGSSSNIGSSSVSWYQQ |
| | | WVRQAPGKGLEWVGRIKSVTDGETTDYAAPVKGRF | LPGTAPKLLIYKNNQRPSGVPDRFSGSKSGTSASLAISG |
| | | TISRDDSKSTLYLQMNSLKTEDTAVYYCTSSFCCR | LRSEDEADYYCSTWDDSNSVRVFGGGTKLTVL (SEQ |
| | | GGSCPSHDTSYCGGQYKSYYYMDVWGKGTTVTVSS | ID NO: 1654) |
| | | (SEQ ID NO: 1460) | |
| 129 | AIP-159037 | EVQLVESGGALVKPGGSLRLSCAASGFTFSKAWMS | QSVLTQPPSASGTPGQRVTISCSGSSSNIGSSSVSWYQQ |
| | | WVRQAPGKGLEWVGRIKSVTDGETTDYAAPVKGRF | LPGTAPKLLIYKNNQRPSGVPDRFSGSKSGTSASLAISG |
| | | TISRDDSKSTLYLQMNSLKTEDTAVYYCTSSFCCR | LRSEDEADYYCSTWDDSSSVRVFGGGTKLTVL (SEQ |
| | | GGSCPSHDTSYCGGQYKSYYYMDVWGKGTTVTVSS | ID NO: 1655) |
| | | (SEQ ID NO: 1461) | |
| 130 | AIP-186826 | EVQLVESGGALVKPGGSLRLSCAASGFTFSKAWMS | QSVLTQPPSASGTPGQRVTISCSGSSSNIGSSSVSWYQQ |
| | | WVRQAPGKGLEWVGRIKSVTDGETTDYAAPVKGRF | LPGTAPKLLIYKNNQRPSGVPDRFSGSKSGTSASLAISG |
| | | TISRDDSKSTLYLQMNSLKTEDTAVYYCTSSFCCR | LRSEDEADYYCSTWDDSLNVRVFGGGTKLTVL (SEQ |
| | | GGSCPSHDTSYCGGQYKSYYYMDVWGKGTTVTVSS | ID NO: 1656) |
| | | (SEQ ID NO: 1462) | |
| 131 | AIP-156514 | EVQLVESGGALVKPGGSLRLSCAASGFTFSKAWMS | QSVLTQPPSASGTPGQRVTISCSGSSSNIGSSSVSWYQQ |
| | | WVRQAPGKGLEWVGRIKSVTDGETTDYAAPVKGRF | LPGTAPKLLIYKNNQRPSGVPDRFSGSKSGTSASLAISG |
| | | TISRDDSKSTLYLQMNSLKTEDTAVYYCTSSFCCR | LRSEDEADYYCSTWDDSLLVRVFGGGTKLTVL (SEQ |
| | | GGSCPSHDTSYCGGQYKSYYYMDVWGKGTTVTVSS | ID NO: 1657) |
| | | (SEQ ID NO: 1463) | |
| 132 | AIP-157122 | EVQLVESGGALVKPGGSLRLSCAASGFTFSKAWMS | QSVLTQPPSASGTPGQRVTISCSGSSSNIGSSSVSWYQQ |
| | | WVRQAPGKGLEWVGRIKSVTDGETTDYAAPVKGRF | LPGTAPKLLIYKNNQRPSGVPDRFSGSKSGTSASLAISG |
| | | TISRDDSKSTLYLQMNSLKTEDTAVYYCTSSFCCR | LRSEDEADYYCSTWDDSLTVRVFGGGTKLTVL (SEQ |
| | | GGSCPSHDTSYCGGQYKSYYYMDVWGKGTTVTVSS | ID NO: 1658) |
| | | (SEQ ID NO: 1464) | |
| 133 | AIP-173276 | EVQLVESGGALVKPGGSLRLSCAASGFTFSKAWMS | QSVLTQPPSASGTPGQRVTISCSGSSSNIGSSSVSWYQQ |
| | | WVRQAPGKGLEWVGRIKSVTDGETTDYAAPVKGRF | LPGTAPKLLIYKNNQRPSGVPDRFSGSKSGTSASLAISG |
| | | TISRDDSKSTLYLQMNSLKTEDTAVYYCTSSFCCR | LRSEDEADYYCSTWDDSLSIRVFGGGTKLTVL (SEQ |
| | | GGSCPSHDTSYCGGQYKSYYYMDVWGKGTTVTVSS | ID NO: 1659) |
| | | (SEQ ID NO: 1465) | |
| 134 | AIP-150485 | EVQLVESGGALVKPGGSLRLSCAASGFTFSKAWMS | QSVLTQPPSASGTPGQRVTISCSGSSSNIGSSSVSWYQQ |
| | | WVRQAPGKGLEWVGRIKSVTDGETTDYAAPVKGRF | LPGTAPKLLIYKNNQRPSGVPDRFSGSKSGTSASLAISG |
| | | TISRDDSKSTLYLQMNSLKTEDTAVYYCTSSFCCR | LRSEDEADYYCSTWDDSLSVKVFGGGTKLTVL (SEQ |
| | | GGSCPSHDTSYCGGQYKSYYYMDVWGKGTTVTVSS | ID NO: 1660) |
| | | (SEQ ID NO: 1466) | |
| 135 | AIP-135679 | EVQLVESGGALVKPGGSLRLSCAASGFTFSKAWMS | QSVLTQPPSASGTPGQRVTISCSGSSSNIGSSSVSWYQQ |
| | | WVRQAPGKGLEWVGRIKSVTDGETTDYAAPVKGRF | LPGTAPKLLIYKNNQRPSGVPDRFSGSKSGTSASLAISG |
| | | TISRDDSKSTLYLQMNSLKTEDTAVYYCTSSFCCR | LRSEDEADYYCSTWDDSLSVWVFGGGTKLTVL (SEQ |
| | | GGSCPSHDTSYCGGQYKSYYYMDVWGKGTTVTVSS | ID NO: 1661) |
| | | (SEQ ID NO: 1467) | |
| 136 | AIP-166847 | EVQLVESGGALVKPGGSLRLSCAASGFTFSKAWMS | QSVLTQPPSASGTPGQRVTISCSGSSSNIGSSSVSWYQQ |
| | | WVRQAPGKGLEWVGRIKSVTDGETTDYAAPVKGRF | LPGTAPKLLIYKNNQRPSGVPDRFSGSKSGTSASLAISG |
| | | TISRDDSKSTLYLQMNSLKTEDTAVYYCTSSFCCR | LRSEDEADYYCSTWDDSLSVHVFGGGTKLTVL (SEQ |
| | | GGSCPSHDTSYCGGQYKSYYYMDVWGKGTTVTVSS | ID NO: 1662) |
| | | (SEQ ID NO: 1468) | |
| 137 | AIP-124013 | EVQLVESGGALVKPGGSLRLSCAASGFTFSKAWMS | QSVLTQPPSASGTPGQRVTISCSGSSSNIGSSSVSWYQQ |
| | | WVRQAPGKGLEWVGRIKSVTDGETTDYAAPVKGRF | LPGTAPKLLIYKNNQRPSGVPDRFSGSKSGTSASLAISG |
| | | TISRDDSKSTLYLQMNSLKTEDTAVYYCTSSFCCR | LRSEDEADYYCSTWDDSLSVQVFGGGTKLTVL (SEQ |
| | | GGSCPSHDTSYCGGQYKSYYYMDVWGKGTTVTVSS | ID NO: 1663) |
| | | (SEQ ID NO: 1469) | |
| 138 | AIP-126285 | EVQLVESGGALVKPGGSLRLSCAASGFTFSKAWMS | QSVLTQPPSASGTPGQRVTISCSGSSSNIGSSSVSWYQQ |
| | | WVRQAPGKGLEWVGRIKSVTDGETTDYAAPVKGRF | LPGTAPKLLIYKNNQRPSGVPDRFSGSKSGTSASLAISG |
| | | TISRDDSKSTLYLQMNSLKTEDTAVYYCTSSFCCR | LRSEDEADYYCSTWDDSLSVRIFGGGTKLTVL (SEQ |
| | | GGSCPSHDTSYCGGQYKSYYYMDVWGKGTTVTVSS | ID NO: 1664) |
| | | (SEQ ID NO: 1470) | |
| 139 | AIP-190274 | EVQLVESGGALVKPGGSLRLSCAASGFTFSKAWMS | QSVLTQPPSASGTPGQRVTISCSGSSSDIGSSSVSWYQQ |
| | | WVRQAPGKGLEWVGRIKSVTDGETTDYAAPVKGRF | LPGTAPKLLIYKNNQRPSGVPDRFSGSKSGTSASLAISG |
| | | TISRDDSKSTLYLQMNSLKTEDTAVYYCTSSFCCR | LRSEDEADYYCSTWNDQLSVRVFGGGTKLTVL (SEQ |
| | | GGSCPSHDTSYCGGQYKSYYYMDVWGKGTTVTVSS | ID NO: 1665) |
| | | (SEQ ID NO: 1471) | |
| 140 | AIP-150277 | EVQLVESGGALVKPGGSLRLSCAASGFTFSKAWMS | QSVLTQPPSASGTPGQRVTISCHGSESDIGSHDVLWYQQ |
| | | WVRQAPGKGLEWVGRIKSVTDGETTDYAAPVKGRF | LPGTAPKLLIYKNNQRPSGVPDRFSGSKSGTSASLAISG |
| | | TISRDDSKSTLYLQMNSLKTEDTAVYYCTSSFCCR | LRSEDEADYYCSTWDDSLSVRVFGGGTKLTVL (SEQ |
| | | GGSCPSHDTSYCGGQYKSYYYMDVWGKGTTVTVSS | ID NO: 1666) |
| | | (SEQ ID NO: 1472) | |
| 141 | AIP-104364 | EVQLVESGGALVKPGGSLRLSCAASGFTFSKAWYS | QSVLTQPPSASGTPGQRVTISCSGSSSNIGSSSVSWYQQ |
| | | WVRQAPGKGLEWVGRIKSVTDGETTDYAAPVKGRF | LPGTAPKLLIYKNNQRPSGVPDRFSGSKSGTSASLAISG |
| | | TISRDDSKSTLYLQMNSLKTEDTAVYYCTSSFCCR | LRSEDEADYYCSTWDDSLSVRVFGGGTKLTVL (SEQ |
| | | GGSCPSHDTSYCGGQYKSYYYMDVWGKGTTVTVSS | ID NO: 1667) |
| | | (SEQ ID NO: 1473) | |
| 142 | AIP-180422 | EVQLVESGGGLVQPGGSLRLSCAASGFTFSKAWMS | QSVLTQPPSASGTPGQRVTISCSGSSSNIGSSSVSWYQQ |
| | | WVRQAPGKGLEWVGRIKSVTDGETTEYAASVKGRF | LPGTAPKLLIYKNNQRPSGVPDRFSGSKSGTSASLAISG |
| | | TISRDDSKNSLYLQMNSLKTEDTAVYYCTSSFCCR | LRSEDEADYYCSTWDDSLSVRVFGGGTKLTVL (SEQ |
| | | GGSCPSHDTSYCGGQYKSYYYMDVWGKGTTVTVSS | ID NO: 1668) |
| | | (SEQ ID NO: 1474) | |
| 143 | AIP-166722 | EVQLVESGGGLVQPGGSLRLSCAASGFTFSKAWMS | QSVLTQPPSVSGAPGQRVTISCSGSSSNIGSSSVSWYQQ |
| | | WVRQAPGKGLEWVGRIKSVTDGETTEYAASVKGRF | LPGTAPKLLIYKNNQRPSGVPDRFSGSKSGTSASLAITG |
| | | TISRDDSKNSLYLQMNSLKTEDTAVYYCTSSFCCR | LQAEDEADYYCSTWDDSLSVRVFGGGTKLTVL (SEQ |
| | | GGSCPSHDTSYCGGQYKSYYYMDVWGKGTTVTVSS | ID NO: 1669) |
| | | (SEQ ID NO: 1475) | |
| 144 | AIP-193490 | EVQLVESGGGLVQPGPSLRLSCTASGFTFSKAWMS | QSVLTQPPSVSGAPGQRVTISCSGSSSNIGSSSVSWYQQ |
| | | WVRQAPGKGLEWVGFIKSVTDGETTEYAASVKGRF | LPGTAPKLLIYKNNQRPSGVPDRFSGSKSGTSASLAITG |
| | | TISRDDSKSIAYLQMNSLKTEDTAVYYCTSSFCCR | LQAEDEADYYCSTWDDSLSVRVFGGGTKLTVL (SEQ |
| | | GGSCPSHDTSYCGGQYKSYYYMDVWGKGTTVTVSS | ID NO: 1670) |
| | | (SEQ ID NO: 1476) | |
| 145 | AIP-129967 | EVQLVESGGALVKPGGSLRLSCAASGFTFSKAWMS | QSVLTQPPSASGTPGQRVTISCSGSSSNIGSSSVSWYQQ |
| | | WVRQAPGKGLEWVGRIKSVTDGETTDYAAPVKGRF | LPGTAPKLLIYKNNQRPSGVPDRFSGSKSGTSASLAISG |
| | | TISRDDSKSTLYLQMNSLKTEDTAVYYCTSSYCCR | LRSEDEADYYCSTWDDSLSVRVFGGGTKLTVL (SEQ |
| | | SGSCPSSDTSYCNGQFKSYYYMDPWGKGTTVTVSS | ID NO: 1671) |
| | | (SEQ ID NO: 1477) | |
| 146 | AIP-126175 | EVQLVESGGALVKPGGSLRLSCAASGFTFSKAWMS | QSVLTQPPSASGTPGQRVTISCSGSSSNIGSSSVSWYQQ |
| | | WVRQAPGKGLEWVGRIKSVTDGETTDYAAPVKGRF | LPGTAPKLLIYKNNQRPSGVPDRFSGSKSGTSASLAISG |
| | | TISRDDSKSTLYLQMNSLKTEDTAVYYCTSSFCCR | LRSEDEADYYCSTWDDSLSVRVFGGGTKLTVL (SEQ |
| | | SGSCPSSDTSYCNGQYKSYYYVNIWGKGTTVTVSS | ID NO: 1672) |
| | | (SEQ ID NO: 1478) | |
| 147 | AIP-180905 | EVQLVESGGALVKPGGSLRLSCAASGFTFSKAWMS | QSVLTQPPSASGTPGQRVTISCSGSSSNIGSSSVSWYQQ |
| | | WVRQAPGKGLEWVGRIKSVTDGETTDYAAPVKGRF | LPGTAPKLLIYKNNQRPSGVPDRFSGSKSGTSASLAISG |
| | | TISRDDSKSTLYLQMNSLKTEDTAVYYCTTSFCCR | LRSEDEADYYCSTWDDSLSVRVFGGGTKLTVL (SEQ |
| | | GASCPSHDTSYCAGSYKSYYYVNIWGKGTTVTVS | ID NO: 1673) |
| | | (SEQ ID NO: 1479) | |
| 148 | AIP-141706 | EVQLVESGGALVKPGGSLRLSCAASGFTFSKAWMS | QSVLTQPPSASGTPGQRVTISCSGSSSNIGSSSVSWYQQ |
| | | WVRQAPGKGLEWVGRIKSVTDGETTDYAAPVKGRF | LPGTAPKLLIYKNNQRPSGVPDRFSGSKSGTSASLAISG |
| | | TISRDDSKSTLYLQMNSLKTEDTAVYYCTSAFCCR | LRSEDEADYYCSTWDDSLSVRVFGGGTKLTVL (SEQ |
| | | GKSCPSSDTSYCGGQYPSYYYVNIWGKGTTVTVSS | ID NO: 1674) |
| | | (SEQ ID NO: 1480) | |
| 149 | AIP-105092 | EVQLVESGGALVKPGGSLRLSCAASGFTFSKAWMS | QSVLTQPPSASGTPGQRVTISCSGSSSNIGSSSVSWYQQ |
| | | WVRQAPGKGLEWVGRIKSVTDGETTDYAAPVKGRF | LPGTAPKLLIYKNNQRPSGVPDRFSGSKSGTSASLAISG |
| | | TISRDDSKSTLYLQMNSLKTEDTAVYYCTSAFCCR | LRSEDEADYYCSTWDDSLSVRVFGGGTKLTVL (SEQ |
| | | GKSCPSHDTSFCGGQDKRYYYVNIWGKGTTVTVSS | ID NO: 1675) |
| | | (SEQ ID NO: 1481) | |
| 150 | AIP-152031 | EVQLVESGGALVKPGGSLRLSCAASGFTFSKAWMS | QSVLTQPPSASGTPGQRVTISCSGSSSNIGSSSVSWYQQ |
| | | WVRQAPGKGLEWVGRIKSVTDGETTDYAAPVKGRF | LPGTAPKLLIYKNNQRPSGVPDRFSGSKSGTSASLAISG |
| | | TISRDDSKSTLYLQMNSLKTEDTAVYYCTSAFCCR | LRSEDEADYYCSTWDDSLSVRVFGGGTKLTVL (SEQ |
| | | GGNCPSHETSYCNGQNKQYYYMDVWGKGTTVTVSS | ID NO: 1676) |
| | | (SEQ ID NO: 1482) | |
| 151 | AIP-163319 | EVQLVESGGALVKPGGSLRLSCAASGFTFSKAWMS | QSVLTQPPSASGTPGQRVTISCSGSSSNIGSSSVSWYQQ |
| | | WVRQAPGKGLEWVGRIKSVTDGETTDYAAPVKGRF | LPGTAPKLLIYKNNQRPSGVPDRFSGSKSGTSASLAISG |
| | | TISRDDSKSTLYLQMNSLKTEDTAVYYCTSSFCCR | LRSEDEADYYCSTWDDSLSVRVFGGGTKLTVL (SEQ |
| | | GNQCPSSDTSFCGGQDKRYYYMDPWGKGTTVTVSS | ID NO: 1677) |
| | | (SEQ ID NO: 1483) | |
| 152 | AIP-160621 | EVQLVESGGALVKPGGSLRLSCAASGFTFSKAWMS | QSVLTQPPSASGTPGQRVTISCSGSSSNIGSSSVSWYQQ |
| | | WVRQAPGKGLEWVGRIKSVTDGETTDYAAPVKGRF | LPGTAPKLLIYKNNQRPSGVPDRFSGSKSGTSASLAISG |
| | | TISRDDSKSTLYLQMNSLKTEDTAVYYCTTSFCCR | LRSEDEADYYCSTWDDSLSVRVFGGGTKLTVL (SEQ |
| | | GNQCPSHETSYCGGYYKSYFYMDVWGKGTTVTVSS | ID NO: 1678) |
| | | (SEQ ID NO: 1484) | |
| 153 | AIP-145212 | EVQLVESGGALVKPGGSLRLSCAASGFTFSKAWMS | QSVLTQPPSASGTPGQRVTISCSGSSSNIGSSSVSWYQQ |
| | | WVRQAPGKGLEWVGRIKSVTDGETTDYAAPVKGRF | LPGTAPKLLIYKNNQRPSGVPDRFSGSKSGTSASLAISG |
| | | TISRDDSKSTLYLQMNSLKTEDTAVYYCTSSYCCR | LRSEDEADYYCSTWDDSLSVRVFGGGTKLTVL (SEQ |
| | | GKQCPSHDTSYCAGQYADYYYMDVWGKGTTVTVSS | ID NO: 1679) |
| | | (SEQ ID NO: 1485) | |
| 154 | AIP-112328 | EVQLVESGGALVKPGGSLRLSCAASGFTFSKAWMS | QSVLTQPPSASGTPGQRVTISCSGSSSNIGSSSVSWYQQ |
| | | WVRQAPGKGLEWVGRIKSVTDGETTDYAAPVKGRF | LPGTAPKLLIYKNNQRPSGVPDRFSGSKSGTSASLAISG |
| | | TISRDDSKSTLYLQMNSLKTEDTAVYYCISSFCCR | LRSEDEADYYCSTWDDSLSVRVFGGGTKLTVL (SEQ |
| | | GKQCPSSDTSYCNGQYADYYYMDVWGKGTTVTVSS | ID NO: 1680) |
| | | (SEQ ID NO: 1486) | |
| 155 | AIP-193106 | EVQLVESGGALVKPGGSLRLSCAASGFTFSKAWMS | QSVLTQPPSASGTPGQRVTISCSGSSSNIGSSSVSWYQQ |
| | | WVRQAPGKGLEWVGRIKSVTDGETTDYAAPVKGRF | LPGTAPKLLIYKNNQRPSGVPDRFSGSKSGTSASLAISG |
| | | TISRDDSKSTLYLQMNSLKTEDTAVYYCTSSFCCR | LRSEDEADYYCSTWDDSLSVRVFGGGTKLTVL (SEQ |
| | | GKQCPSSDTSYCNGQYADYYYVNIWGKGTTVTVSS | ID NO: 1681) |
| | | (SEQ ID NO: 1487) | |
| 156 | AIP-125062 | EVQLVESGGALVKPGGSLRLSCAASGFTFSKAWMS | QSVLTQPPSASGTPGQRVTISCSGSSSNIGSSSVSWYQQ |
| | | WVRQAPGKGLEWVGRIKSVTDGETTDYAAPVKGRF | LPGTAPKLLIYKNNQRPSGVPDRFSGSKSGTSASLAISG |
| | | TISRDDSKSTLYLQMNSLKTEDTAVYYCISSFCCR | LRSEDEADYYCSTWDDSLSVRVFGGGTKLTVL (SEQ |
| | | GKQCPSSDTSFCGGQDKRYYFMDVWGKGTTVTVSS | ID NO: 1682) |
| | | (SEQ ID NO: 1488) | |
| 157 | AIP-124301 | EVQLVESGGALVKPGGSLRLSCAASGFTFSKAWMS | QSVLTQPPSASGTPGQRVTISCSGSSSNIGSSSVSWYQQ |
| | | WVRQAPGKGLEWVGRIKSVTDGETTDYAAPVKGRF | LPGTAPKLLIYKNNQRPSGVPDRFSGSKSGTSASLAISG |
| | | TISRDDSKSTLYLQMNSLKTEDTAVYYCTSAFCCR | LRSEDEADYYCSTWDDSLSVRVFGGGTKLTVL (SEQ |
| | | GKQCPSSDTSYCGGQYASFYYMDVWGKGTTVTVSS | ID NO: 1683) |
| | | (SEQ ID NO: 1489) | |
| 158 | AIP-124068 | EVQLVESGGALVKPGGSLRLSCAASGFTFSKAWMS | QSVLTQPPSASGTPGQRVTISCSGSSSNIGSSSVSWYQQ |
| | | WVRQAPGKGLEWVGRIKSVTDGETTDYAAPVKGRF | LPGTAPKLLIYKNNQRPSGVPDRFSGSKSGTSASLAISG |
| | | TISRDDSKSTLYLQMNSLKTEDTAVYYCTSSFCCQ | LRSEDEADYYCSTWDDSLSVRVFGGGTKLTVL (SEQ |
| | | GNNCPSSDTSYCGGYYKDYYYMDVWGKGTTVTVSS | ID NO: 1684) |
| | | (SEQ ID NO: 1490) | |
| 159 | AIP-144568 | EVQLVESGGALVKPGGSLRLSCAASGFTFSKAWMS | QSVLTQPPSASGTPGQRVTISCSGSSSNIGSSSVSWYQQ |
| | | WVRQAPGKGLEWVGRIKSVTDGETTDYAAPVKGRF | LPGTAPKLLIYKNNQRPSGVPDRFSGSKSGTSASLAISG |
| | | TISRDDSKSTLYLQMNSLKTEDTAVYYCTSSFCCQ | LRSEDEADYYCSTWDDSLSVRVFGGGTKLTVL (SEQ |
| | | GNNCPSHDTSYCGGQYKSYYYVNIWGKGTTVTVSS | ID NO: 1685) |
| | | (SEQ ID NO: 1491) | |
| 160 | AIP-139782 | EVQLVESGGALVKPGGSLRLSCAASGFTFSKAWMS | QSVLTQPPSASGTPGQRVTISCSGSSSNIGSSSVSWYQQ |
| | | WVRQAPGKGLEWVGRIKSVTDGETTDYAAPVKGRF | LPGTAPKLLIYKNNQRPSGVPDRFSGSKSGTSASLAISG |
| | | TISRDDSKSTLYLQMNSLKTEDTAVYYCTSSFCCQ | LRSEDEADYYCSTWDDSLSVRVFGGGTKLTVL (SEQ |
| | | GKNCPSHETSYCGGQYADYYYMDVWGKGTTVTVSS | ID NO: 1686) |
| | | (SEQ ID NO: 1492) | |
| 161 | AIP-171543 | EVQLVESGGALVKPGGSLRLSCAASGFTFSKAWMS | QSVLTQPPSASGTPGQRVTISCSGSSSNIGSSSVSWYQQ |
| | | WVRQAPGKGLEWVGRIKSVTDGETTDYAAPVKGRF | LPGTAPKLLIYKNNQRPSGVPDRFSGSKSGTSASLAISG |
| | | TISRDDSKSTLYLQMNSLKTEDTAVYYCTTSFCCH | LRSEDEADYYCSTWDDSLSVRVFGGGTKLTVL (SEQ |
| | | GNSCPSSDTSYCGGQNKQYYYMDVWGKGTTVTVSS | ID NO: 1687) |
| | | (SEQ ID NO: 1493) | |
| 162 | AIP-140148 | EVQLVESGGALVKPGGSLRLSCAASGFTFSKAWMS | QSVLTQPPSASGTPGQRVTISCSGSSSNIGSSSVSWYQQ |
| | | WVRQAPGKGLEWVGRIKSVTDGETTDYAAPVKGRF | LPGTAPKLLIYKNNQRPSGVPDRFSGSKSGTSASLAISG |
| | | TISRDDSKSTLYLQMNSLKTEDTAVYYCISSFCCH | LRSEDEADYYCSTWDDSLSVRVFGGGTKLTVL (SEQ |
| | | GNSCPSHDTSYCNGQNKQYYYMDVWGKGTTVTVSS | ID NO: 1688) |
| | | (SEQ ID NO: 1494) | |
| 163 | AIP-177193 | EVQLVESGGALVKPGGSLRLSCAASGFTFSKAWMS | QSVLTQPPSASGTPGQRVTISCSGSSSNIGSSSVSWYQQ |
| | | WVRQAPGKGLEWVGRIKSVTDGETTDYAAPVKGRF | LPGTAPKLLIYKNNQRPSGVPDRFSGSKSGTSASLAISG |
| | | TISRDDSKSTLYLQMNSLKTEDTAVYYCISSFCCH | LRSEDEADYYCSTWDDSLSVRVFGGGTKLTVL (SEQ |
| | | SNNCPSSDTSYCNGQYKQYYYMDVWGKGTTVTVSS | ID NO: 1689) |
| | | (SEQ ID NO: 1495) | |
| 164 | AIP-171348 | EVQLVESGGALVKPGGSLRLSCAASGFTFSKAWMS | QSVLTQPPSASGTPGQRVTISCSGSSSNIGSSSVSWYQQ |
| | | WVRQAPGKGLEWVGRIKSVTDGETTDYAAPVKGRF | LPGTAPKLLIYKNNQRPSGVPDRFSGSKSGTSASLAISG |
| | | TISRDDSKSTLYLQMNSLKTEDTAVYYCTSSFCCH | LRSEDEADYYCSTWDDSLSVRVFGGGTKLTVL (SEQ |
| | | SNNCPSHDTSYCGGQYKSYYYVNIWGKGTTVTVSS | ID NO: 1690) |
| | | (SEQ ID NO: 1496) | |
| 165 | AIP-193088 | EVQLVESGGALVKPGGSLRLSCAASGFTFSKAWMS | QSVLTQPPSASGTPGQRVTISCSGSSSNIGSSSVSWYQQ |
| | | WVRQAPGKGLEWVGRIKSVTDGETTDYAAPVKGRF | LPGTAPKLLIYKNNQRPSGVPDRFSGSKSGTSASLAISG |
| | | TISRDDSKSTLYLQMNSLKTEDTAVYYCISSFACH | LRSEDEADYYCSTWDDSLSVRVFGGGTKLTVL (SEQ |
| | | SNNCPSSDTSYVNGYYKQYYFMDVWGKGTTVTVSS | ID NO: 1691) |
| | | (SEQ ID NO: 1497) | |
| 166 | AIP-182087 | EVQLVESGGALVKPGGSLRLSCAASGFTFSKAWMS | QSVLTQPPSASGTPGQRVTISCSGSSSNIGSSSVSWYQQ |
| | | WVRQAPGKGLEWVGRIKSVTDGETTDYAAPVKGRF | LPGTAPKLLIYKNNQRPSGVPDRFSGSKSGTSASLAISG |
| | | TISRDDSKSTLYLQMNSLKTEDTAVYYCTSSFCCH | LRSEDEADYYCSTWDDSLSVRVFGGGTKLTVL (SEQ |
| | | SNNCPSSDTSYCNGQYKQYYYVNIWGKGTTVTVSS | ID NO: 1692) |
| | | (SEQ ID NO: 1498) | |
| 167 | AIP-151388 | EVQLVESGGALVKPGGSLRLSCAASGFTFSKAWMS | QSVLTQPPSASGTPGQRVTISCSGSSSNIGSSSVSWYQQ |
| | | WVRQAPGKGLEWVGRIKSVTDGETTDYAAPVKGRF | LPGTAPKLLIYKNNQRPSGVPDRFSGSKSGTSASLAISG |
| | | TISRDDSKSTLYLQMNSLKTEDTAVYYCTSSFCCL | LRSEDEADYYCSTWDDSLSVRVFGGGTKLTVL (SEQ |
| | | GKACLSHDTSYCGGQYASYYYVNIWGKGTTVTVSS | ID NO: 1693) |
| | | (SEQ ID NO: 1499) | |
| 168 | AIP-149787 | EVQLVESGGALVKPGGSLRLSCAASGFTFSKAWMS | QSVLTQPPSASGTPGQRVTISCSGSSSNIGSSSVSWYQQ |
| | | WVRQAPGKGLEWVGRIKSVTDGETTDYAAPVKGRF | LPGTAPKLLIYKNNQRPSGVPDRFSGSKSGTSASLAISG |
| | | TISRDDSKSTLYLQMNSLKTEDTAVYYCTSSFCCL | LRSEDEADYYCSTWDDSLSVRVFGGGTKLTVL (SEQ |
| | | GKACLSSDTSYCGGYYASYYFVNIWGKGTTVTVSS | ID NO: 1694) |
| | | (SEQ ID NO: 1500) | |
| 169 | AIP-126097 | EVQLVESGGALVKPGGSLRLSCAASGFTFSKAWMS | QSVLTQPPSASGTPGQRVTISCSGSSSNIGSSSVSWYQQ |
| | | WVRQAPGKGLEWVGRIKSVTDGETTDYAAPVKGRF | LPGTAPKLLIYKNNQRPSGVPDRFSGSKSGTSASLAISG |
| | | TISRDDSKSTLYLQMNSLKTEDTAVYYCTSSFACL | LRSEDEADYYCSTWDDSLSVRVFGGGTKLTVL (SEQ |
| | | GKACLSSDTSYVGGYYASYYFVNIWGKGTTVTVSS | ID NO: 1695) |
| | | (SEQ ID NO: 1501) | |
| 170 | AIP-107759 | EVQLVESGGALVKPGGSLRLSCAASGFTFSKAWMS | QSVLTQPPSASGTPGQRVTISCSGSSSNIGSSSVSWYQQ |
| | | WVRQAPGKGLEWVGRIKSVTDGETTDYAAPVKGRF | LPGTAPKLLIYKNNQRPSGVPDRFSGSKSGTSASLAISG |
| | | TISRDDSKSTLYLQMNSLKTEDTAVYYCTSSYCCL | LRSEDEADYYCSTWDDSLSVRVFGGGTKLTVL (SEQ |
| | | GNSCPSSDTSYCGGQFKSYYYMDPWGKGTTVTVSS | ID NO: 1696) |
| | | (SEQ ID NO: 1502) | |
| 171 | AIP-148484 | EVQLVESGGALVKPGGSLRLSCAASGFTFSKAWMS | QSVLTQPPSASGTPGQRVTISCSGSSSNIGSSSVSWYQQ |
| | | WVRQAPGKGLEWVGRIKSVTDGETTDYAAPVKGRF | LPGTAPKLLIYKNNQRPSGVPDRFSGSKSGTSASLAISG |
| | | TISRDDSKSTLYLQMNSLKTEDTAVYYCTSSYCCL | LRSEDEADYYCSTWDDSLSVRVFGGGTKLTVL (SEQ |
| | | GNSCPSSDTSFCGGQDKRYYYMDPWGKGTTVTVSS | ID NO: 1697) |
| | | (SEQ ID NO: 1503) | |
| 172 | AIP-186403 | EVQLVESGGALVKPGGSLRLSCAASGFTFSKAWMS | QSVLTQPPSASGTPGQRVTISCSGSSSNIGSSSVSWYQQ |
| | | WVRQAPGKGLEWVGRIKSVTDGETTDYAAPVKGRF | LPGTAPKLLIYKNNQRPSGVPDRFSGSKSGTSASLAISG |
| | | TISRDDSKSTLYLQMNSLKTEDTAVYYCISSFCCL | LRSEDEADYYCSTWDDSLSVRVFGGGTKLTVL (SEQ |
| | | GGNCPSSETSYCGNQYPSYYYMDVWGKGTTVTVSS | ID NO: 1698) |
| | | (SEQ ID NO: 1504) | |
| 173 | AIP-166629 | EVQLVESGGALVKPGGSLRLSCAASGFTFSKAWMS | QSVLTQPPSASGTPGQRVTISCSGSSSNIGSSSVSWYQQ |
| | | WVRQAPGKGLEWVGRIKSVTDGETTDYAAPVKGRF | LPGTAPKLLIYKNNQRPSGVPDRFSGSKSGTSASLAISG |
| | | TISRDDSKSTLYLQMNSLKTEDTAVYYCISSFCCL | LRSEDEADYYCSTWDDSLSVRVFGGGTKLTVL (SEQ |
| | | GGNCPSSETSYCGNYYPSYFYMDVWGKGTTVTVSS | ID NO: 1699) |
| | | (SEQ ID NO: 1505) | |
| 174 | AIP-165276 | EVQLVESGGALVKPGGSLRLSCAASGFTFSKAWMS | QSVLTQPPSASGTPGQRVTISCSGSSSNIGSSSVSWYQQ |
| | | WVRQAPGKGLEWVGRIKSVTDGETTDYAAPVKGRF | LPGTAPKLLIYKNNQRPSGVPDRFSGSKSGTSASLAISG |
| | | TISRDDSKSTLYLQMNSLKTEDTAVYYCTSSFCCL | LRSEDEADYYCSTWDDSLSVRVFGGGTKLTVL (SEQ |
| | | GGNCPSSETSYCGNQYPSYYYVNIWGKGTTVTVSS | ID NO: 1700) |
| | | (SEQ ID NO: 1506) | |
| 175 | AIP-188293 | EVQLVESGGALVKPGGSLRLSCAASGFTFSKAWMS | QSVLTQPPSASGTPGQRVTISCSGSSSNIGSSSVSWYQQ |
| | | WVRQAPGKGLEWVGRIKSVTDGETTDYAAPVKGRF | LPGTAPKLLIYKNNQRPSGVPDRFSGSKSGTSASLAISG |
| | | TISRDDSKSTLYLQMNSLKTEDTAVYYCTTSFACR | LRSEDEADYYCSTWDDSLSVRVFGGGTKLTVL (SEQ |
| | | GNQCPSHETSYVGGYYKSYFYMDVWGKGTTVTVSS | ID NO: 1701) |
| | | (SEQ ID NO: 1507) | |
| 176 | AIP-109364 | EVQLVESGGALVKPGGSLRLSCAASGFTFSKAWMS | QSVLTQPPSASGTPGQRVTISCSGSSSNIGSSSVSWYQQ |
| | | WVRQAPGKGLEWVGRIKSVTDGETTDYAAPVKGRF | LPGTAPKLLIYKNNQRPSGVPDRFSGSKSGTSASLAISG |
| | | TISRDDSKSTLYLQMNSLKTEDTAVYYCTTSFACR | LRSEDEADYYCSTWDDSLSVRVFGGGTKLTVL (SEQ |
| | | GNQCPSSETSYVGGYYKSYFFMDVWGKGTTVTVSS | ID NO: 1702) |
| | | (SEQ ID NO: 1508) | |
| 177 | AIP-191805 | EVQLVESGGALVKPGGSLRLSCAASGFTFSKAWMS | QSVLTQPPSASGTPGQRVTISCSGSSSNIGSSSVSWYQQ |
| | | WVRQAPGKGLEWVGRIKSVTDGETTDYAAPVKGRF | LPGTAPKLLIYKNNQRPSGVPDRFSGSKSGTSASLAISG |
| | | TISRDDSKSTLYLQMNSLKTEDTAVYYCISSFACR | LRSEDEADYYCSTWDDSLSVRVFGGGTKLTVL (SEQ |
| | | GKQCPSSDTSYVGGQFKSYYFMDVWGKGTTVTVSS | ID NO: 1703) |
| | | (SEQ ID NO: 1509) | |
| 178 | AIP-181592 | EVQLVESGGALVKPGGSLRLSCAASGFTFAKAWMS | QSVLTQPPSASGTPGQRVTISCSGSSTNIGSSSVYWYQQ |
| | | WVRQAPGKGLEWVGRIKAADDGKQTDYAAPVKGRF | LPGTAPKLLIYKNNYRPSGVPDRFSGSKSGTSASLAISG |
| | | TISRDDSKSTLYLQMNSLKTEDTAVYYCTSSFCCR | LRSEDEADYYCSTWDDSLSVRVFGGGTKLTVL (SEQ |
| | | GGSCLSHDTSYCGGQYKSYYWMDVWGKGTTVTVSS | ID NO: 1704) |
| | | (SEQ ID NO: 1510) | |
| 179 | AIP-155587 | EVQLVESGGALVKPGGSLRLSCAASGFTYAKAWMS | QSVLTQPPSASGTPGQRVTISCSGSSTNIGSSSVYWYQQ |
| | | WVRQAPGKGLEWVGRIKSVQDGEQTDYAAPVKGRF | LPGTAPKLLIYKNNYRASGVPDRFSGSKSGTSASLAISG |
| | | TISRDDSKSTLYLQMNSLKTEDTAVYYCTSSYCCL | LRSEDEADYYCSTWDDSLSVRVFGGGTKLTVL (SEQ |
| | | GGSCPSHDTSYCGGSYKSYYYMDVWGKGTTVTVSS | ID NO: 1705) |
| | | (SEQ ID NO: 1511) | |
| 180 | AIP-147945 | EVQLVESGGALVKPGGSLRLSCAASGFDASKAWFT | QSVLTQPPSASGTPGQRVTISCTGSSSNIGSSYVSWYQQ |
| | | WVRQAPGKGLEWVGRIKSVTDGETTDYAAPVKGRF | LPGTAPKLLIYKNSLRPQGVPDRFSGSKSGTSASLAISG |
| | | TISRDDSKSTLYLQMNSLKTEDTAVYYCTSSFCCR | LRSEDEADYYCSTWDDSLSVRVFGGGTKLTVL (SEQ |
| | | GGSCPSHDTSYCGGQNKQYYYMDVWGKGTTVTVSS | ID NO: 1706) |
| | | (SEQ ID NO: 1512) | |
| 181 | AIP-199264 | EVQLVESGGALVKPGGSLRLSCAASGFDASKAWFT | QSVLTQPPSASGTPGQRVTISCTGSSSNIGSSYVSWYQQ |
| | | WVRQAPGKGLEWVGRIKSVTDGETTDYAAPVKGRF | LPGTAPKLLIYKNSLRPQGVPDRFSGSKSGTSASLAISG |
| | | TISRDDSKSTLYLQMNSLKTEDTAVYYCTSSFACR | LRSEDEADYYCSTWDDSLSVRVFGGGTKLTVL (SEQ |
| | | GGSCPSHDTSYVGGQYKSYYYMDVWGKGTTVTVSS | ID NO: 1707) |
| | | (SEQ ID NO: 1513) | |
| 182 | AIP-123438 | EVQLVESGGALVKPGGSLRLSCAASGFDASKAWFT | QSVLTQPPSASGTPGQRVTISCTGSSSNIGSSYVSWYQQ |
| | | WVRQAPGKGLEWVGRIKSVTDGETTDYAAPVKGRF | LPGTAPKLLIYKNSLRPQGVPDRFSGSKSGTSASLAISG |
| | | TISRDDSKSTLYLQMNSLKTEDTAVYYCTSSYCCL | LRSEDEADYYCSTWDDSLSVRVFGGGTKLTVL (SEQ |
| | | GGSCPSHDTSYCGGSYKSYYYMDVWGKGTTVTVSS | ID NO: 1708) |
| | | (SEQ ID NO: 1514) | |
| 183 | AIP-151315 | EVQLVESGGALVKPGGSLRLSCAASGFDASKAWFT | QSVLTQPPSASGTPGQRVTISCTGSSSNIGSSYVSWYQQ |
| | | WVRQAPGKGLEWVGRIKSVTDGETTDYAAPVKGRF | LPGTAPKLLIYKNSLRPQGVPDRFSGSKSGTSASLAISG |
| | | TISRDDSKSTLYLQMNSLKTEDTAVYYCTSSFCCR | LRSEDEADYYCSTWDDSLSVRVFGGGTKLTVL (SEQ |
| | | GKSCPSHDTSYCGGQYASYYYMDVWGKGTTVTVSS | ID NO: 1709) |
| | | (SEQ ID NO: 1515) | |
| 184 | AIP-197785 | EVQLVESGGALVKPGGSLRLSCAASGFTFSKAWMS | QSVLTQPPSASGTPGQRVTISCSGSPSNIGSASTSWYQQ |
| | | WVRQAPGKGLEWVGRIKAADDGKQTDYAAPVKGRF | LPGTAPKLLIYKNNQRPSGVPDRFSGSKSGTSASLAISG |
| | | TISRDDSKSTLYLQMNSLKTEDTAVYYCTSSFCCR | LRSEDEADYYCSTWDDSLSVRVFGGGTKLTVL (SEQ |
| | | GGNCPSHETSYCGNQYKSYYYMDVWGKGTTVTVSS | ID NO: 1710) |
| | | (SEQ ID NO: 1516) | |
| 185 | AIP-115782 | EVQLVESGGALVKPGGSLRLSCAASGFTFSKAWMS | QSVLTQPPSASGTPGQRVTISCSGSPSNIGSASTSWYQQ |
| | | WVRQAPGKGLEWVGRIKAADDGKQTDYAAPVKGRF | LPGTAPKLLIYKNNQRPSGVPDRFSGSKSGTSASLAISG |
| | | TISRDDSKSTLYLQMNSLKTEDTAVYYCTSSFCCR | LRSEDEADYYCSTWDDSLSVRVFGGGTKLTVL (SEQ |
| | | SGSCPSSDTSYCNGQYKSYYYMDVWGKGTTVTVSS | ID NO: 1711) |
| | | (SEQ ID NO: 1517) | |
| 186 | AIP-138130 | EVQLVESGGALVKPGGSLRLSCAASGFTFSKAWMS | QSVLTQPPSASGTPGQRVTISCSGSPSNIGSASTSWYQQ |
| | | WVRQAPGKGLEWVGRIKAADDGKQTDYAAPVKGRF | LPGTAPKLLIYKNNQRPSGVPDRFSGSKSGTSASLAISG |
| | | TISRDDSKSTLYLQMNSLKTEDTAVYYCTSSFCCR | LRSEDEADYYCSTWDDSLSVRVFGGGTKLTVL (SEQ |
| | | GGSCPSHDTSYCGGQYKSYYYVNIWGKGTTVTVSS | ID NO: 1712) |
| | | (SEQ ID NO: 1518) | |
| 187 | AIP-170221 | EVQLVESGGALVKPGGSLRLSCAASGFTFSKAWMS | QSVLTQPPSASGTPGQRVTISCSGSPSNIGSASTSWYQQ |
| | | WVRQAPGKGLEWVGRIKAADDGKQTDYAAPVKGRF | LPGTAPKLLIYKNNQRPSGVPDRFSGSKSGTSASLAISG |
| | | TISRDDSKSTLYLQMNSLKTEDTAVYYCTTSFCCR | LRSEDEADYYCSTWDDSLSVRVFGGGTKLTVL (SEQ |
| | | GASCPSHDTSYCAGSYKSYYYMDVWGKGTTVTVSS | ID NO: 1713) |
| | | (SEQ ID NO: 1519) | |
| 188 | AIP-167482 | EVQLVESGGALVKPGGSLRLSCAASGFTFSKAWMS | QSVLTQPPSASGTPGQRVTISCSGSPSNIGSASTSWYQQ |
| | | WVRQAPGKGLEWVGRIKAADDGKQTDYAAPVKGRF | LPGTAPKLLIYKNNQRPSGVPDRFSGSKSGTSASLAISG |
| | | TISRDDSKSTLYLQMNSLKTEDTAVYYCISSFCCR | LRSEDEADYYCSTWDDSLSVRVFGGGTKLTVL (SEQ |
| | | GNSCPSSDTSYCNGQYKSYYYMDVWGKGTTVTVSS | ID NO: 1714) |
| | | (SEQ ID NO: 1520) | |
| 189 | AIP-189475 | EVQLVESGGALVKPGGSLRLSCAASGFTFSKAWMS | QSVLTQPPSASGTPGQRVTISCSGASSNIGHSSVYWYQQ |
| | | WVRQAPGKGLEWVGRIKAVTDGHTTDYAAPVKGRF | LPGTAPKLLIYRNNQQPLGVPDRFSGSKSGTSASLAISG |
| | | TISRDDSKSTLYLQMNSLKTEDTAVYYCTSSFCCR | LRSEDEADYYCSTWDDALSIRVFGGGTKLTVL (SEQ |
| | | GGSCPSHDTSYCGGQYKSYYYMDVWGKGTTVTVSS | ID NO: 1715) |
| | | (SEQ ID NO: 1521) | |
| 190 | AIP-102833 | EVQLVESGGALVKPGGSLRLSCAASGFVYSKAWMS | QSVLTQPPSASGTPGQRVTISCSGSSSNIGSSSVSWYQQ |
| | | WVRQAPGKGLEWVGRIKSVTDGQATDYAAPVKGRF | LPGTAPKLLIYKNTQRASGVPDRFSGSKSGTSASLAISG |
| | | TISRDDSKSTLYLQMNSLKTEDTAVYYCTSSFCCR | LRSEDEADYYCSTWDDALNVRVFGGGTKLTVL (SEQ |
| | | GGSCPSHDTSYCGGQYKSYYYMDVWGKGTTVTVSS | ID NO: 1716) |
| | | (SEQ ID NO: 1522) | |
| 191 | AIP-173396 | EVQLVESGGALVKPGGSLRLSCAASGFVFSKAWMS | QSVLTQPPSASGTPGQRVTISCSGSSSNIGSSSVSWYQQ |
| | | WVRQAPGKGLEWVGRIKSVTDGETTDYAAPVKGRF | LPGTAPKLLIYRNNQQPLGVPDRFSGSKSGTSASLAISG |
| | | TISRDDSKSTLYLQMNSLKTEDTAVYYCTSSFCCR | LRSEDEADYYCSSWDDSSLVRVFGGGTKLTVL (SEQ |
| | | GKSCPSHDTSYCGGQYASYYYMDVWGKGTTVTVSS | ID NO: 1717) |
| | | (SEQ ID NO: 1523) | |
| 192 | AIP-132355 | EVQLVESGGALVKPGGSLRLSCAASGFTFAKAWMS | QSVLTQPPSASGTPGQRVTISCSGSSSNIGSSSVTWYQQ |
| | | WVRQAPGKGLEWVGRIKSVTDAETTDYAAPVKGRF | LPGTAPKLLIYKNNARPSGVPDRFSGSKSGTSASLAISG |
| | | TISRDDSKSTLYLQMNSLKTEDTAVYYCTSSFCCR | LRSEDEADYYCATWDNSLSIRVFGGGTKLTVL (SEQ |
| | | SGSCPSSDTSYCNGQYKSYYWMDVWGKGTTVTVSS | ID NO: 1718) |
| | | (SEQ ID NO: 1524) | |
| 193 | AIP-118505 | EVQLVESGGALVKPGGSLRLSCAASGFTYAKAWFT | QSVLTQPPSASGTPGQRVTISCSGSKSNIGSSYVSWYQQ |
| | | WVRQAPGKGLEWVGRIKSTSDGGITDYAAPVKGRF | LPGTAPKLLIYKDNQRASGVPDRFSGSKSGTSASLAISG |
| | | TISRDDSKSTLYLQMNSLKTEDTAVYYCTSSFCCR | LRSEDEADYYCSTWDDALSVRVFGGGTKLTVL (SEQ |
| | | GGSCPSHDTSFCGGQYKSYYYMDVWGKGTTVTVSS | ID NO: 1719) |
| | | (SEQ ID NO: 1525) | |
| 194 | AIP-131972 | EVQLVESGGALVKPGGSLRLSCAASGFTFSKAWMS | QSVLTQPPSASGTPGQRVTISCSGSSSNIGSSSVYWYQQ |
| | | WVRQAPGKGLEWVGRIKSVSDGETTDYAAPVKGRF | LPGTAPKLLIYKNNQRPSGVPDRFSGSKSGTSASLAISG |
| | | TISRDDSKSTLYLQMNSLKTEDTAVYYCTSSFCCR | LRSEDEADYYCSTWDDSLSVRVFGGGTKLTVL (SEQ |
| | | GGSCPSRDTSYCGGQYKSYYFMDVWGKGTTVTVS | ID NO: 1720) |
| | | (SEQ ID NO: 1526) | |
| 195 | AIP-189526 | EVQLVESGGGLVKPGGSLRLSCAASGFTFSKAWMT | QSVLTQPPSASGTPGQRVTISCSGSSSNIGSSSVSWYQQ |
| | | WVRQAPGKGLEWVGRIKSTSDGGITDYAAPVKGRF | LPGTAPKLLIYKNNQRPSGVPDRFSGSKSGTSASLAISG |
| | | TISRDDSKNTLYLQMNSLKTEDTAVYYCTTSFCCR | LRSEDEADYYCSTWDDSLSVRVFGGGTKLTVL (SEQ |
| | | GGRCPSRDTSFCGGQYNSYYYMDVWGQGTTVTVSS | ID NO: 1726 |
| | | (SEQ ID NO: 1725) | |

TABLE 2B

| | AIP | | | | | | |
|---|---|---|---|---|---|---|---|
| | Number | HCDR1 | HCDR2 | HCDR3 | LCDR1 | LCDR2 | LCDR3 |
| 1 | AIP- | GFTFSKAWMT | RIKSVTEGET | TSSFCCRGGS | SGSSSNIGSS | KNNQRPS | STWDESLSVR |
| | 148327 | (SEQ ID | TDYAAPVKG | CPSHDTSFCG | SVS | (SEQ ID | V |
| | | NO: 169) | (SEQ ID | GODKRYYYMD | (SEQ ID | NO: 945) | (SEQ ID |
| | | | NO: 363) | V | NO: 751) | | NO: 1139) |
| | | | | (SEQ ID | | | |
| | | | | NO: 557) | | | |
| 2 | AIP- | GFTFSKAWMT | RIKSVTEGET | TSSFCCRGGS | SGSSSNIGSS | KNNORPS | STWDESLSVR |
| | 198092 | (SEQ ID | TDYAAPVKG | CPSHDTSFCG | SV | (SEQ ID | V |
| | | NO: 170) | (SEQ ID | GODKRYYYMD | (SEQ ID | NO: 946) | (SEQ ID |
| | | | NO: 364) | SV | NO: 752) | | NO: 1140) |
| | | | | (SEQ ID | | | |
| | | | | NO: 558) | | | |
| 3 | AIP- | GFTFSKAWMT | RIKSVTDGET | TSSFCCRGGS | SGSSSNIGSS | KNNQRPS | STWDESLSVR |
| | 184490 | (SEQ ID | TDYAAPVKG | CPSHDTSFCG | SV | (SEQ ID | V |
| | | NO: 171) | (SEQ ID | GSYKSYYYMD | (SEQ ID | NO: 947) | (SEQ ID |
| | | | NO: 365) | SV | NO: 753) | | NO: 1141) |
| | | | | (SEQ ID | | | |
| | | | | NO: 559) | | | |
| 4 | AIP- | GFTFSKAWMS | RIKSVTDGET | TSSFCCRGGS | SGSSSNIGSS | KNNORPS | STWDESLSVR |
| | 102396 | (SEQ ID | TDYAAPVKG | CPSHDTSYCG | SV | (SEQ ID | V |
| | | NO: 172) | (SEQ ID | GQYKSYYYMD | (SEQ ID | NO: 948) | (SEQ ID |
| | | | NO: 366) | SV | NO: 754) | | NO: 1142) |
| | | | | (SEQ ID | | | |
| | | | | NO: 560) | | | |
| 5 | AIP- | GYTFSKAWMS | RIKSVTDGET | TSSFCCRGGS | SGSSSNIGSS | KNNORPS | STWDDSLSVR |
| | 150055 | (SEQ ID | TDYAAPVKG | CPSHDTSYCG | SV | (SEQ ID | V |
| | | NO: 173) | (SEQ ID | GQYKSYYYMD | (SEQ ID | NO: 949) | (SEQ ID |
| | | | NO: 367) | SV | NO: 755) | | NO: 1143) |
| | | | | (SEQ ID | | | |
| | | | | NO: 561) | | | |
| 6 | AIP- | GFDFSKAWMS | RIKSVTDGET | TSSFCCRGGS | SGSSSNIGSS | KNNQRPS | STWDDSLSVR |
| | 167084 | (SEQ ID | TDYAAPVKG | CPSHDTSYCG | SVS | (SEQ ID | V |
| | | NO: 174) | (SEQ ID | GQYKSYYYMD | (SEQ ID | NO: 950) | (SEQ ID |
| | | | NO: 368) | V | NO: 756) | | NO: 1144) |
| | | | | (SEQ ID | | | |
| | | | | NO: 562) | | | |
| 7 | AIP- | GFVFSKAWMS | RIKSVTDGET | TSSFCCRGGS | SGSSSNIGSS | KNNQRPS | STWDDSLSVR |
| | 185304 | (SEQ ID | TDYAAPVKG | CPSHDTSYCG | SVS | (SEQ ID | V |
| | | NO: 175) | (SEQ ID | GQYKSYYYMD | (SEQ ID | NO: 951) | (SEQ ID |
| | | | NO: 369) | | NO: 757) | | NO: 1145) |
| 8 | AIP- | GFTYSKAWMS | RIKSVTDGET | TSSFCCRGGS | SGSSSNIGSS | KNNORPS | STWDDSLSVR |
| | 134770 | (SEQ ID | TDYAAPVKG | CPSHDTSYCG | SV | (SEQ ID | V |
| | | NO: 176) | (SEQ ID | GQYKSYYYMD | (SEQ ID | NO: 952) | (SEQ ID |
| | | | NO: 370) | SV | NO: 758) | | NO: 1146) |
| | | | | (SEQ ID | | | |
| | | | | NO: 564) | | | |
| 9 | AIP- | GFTFAKAWMS | RIKSVTDGET | TSSFCCRGGS | SGSSSNIGSS | KNNORPS | STWDDSLSVR |
| | 141887 | (SEQ ID | TDYAAPVKG | CPSHDTSYCG | SV | (SEQ ID | V |
| | | NO: 177) | (SEQ ID | GQYKSYYYMD | (SEQ ID | NO: 953) | (SEQ ID |
| | | | NO: 371) | SV | NO: 759) | | NO: 1147) |
| | | | | (SEQ ID | | | |
| | | | | NO: 565) | | | |
| 10 | AIP- | GFTFSNAWMS | RIKSVTDGET | TSSFCCRGGS | SGSSSNIGSS | KNNORPS | STWDDSLSVR |
| | 196203 | (SEQ ID | TDYAAPVKG | CPSHDTSYCG | SV | (SEQ ID | V |
| | | NO: 178) | (SEQ ID | GQYKSYYYMD | (SEQ ID | NO: 954) | (SEQ ID |
| | | | NO: 372) | SV | NO: 760) | | NO: 1148) |
| | | | | (SEQ ID | | | |
| | | | | NO: 566) | | | |
| 11 | AIP- | GFTFSRAWMS | RIKSVTDGET | TSSFCCRGGS | SGSSSNIGSS | KNNORPS | STWDDSLSVR |
| | 184151 | (SEQ ID | TDYAAPVKG | CPSHDTSYCG | SV | (SEQ ID | V |
| | | NO: 179) | (SEQ ID | GQYKSYYYMD | (SEQ ID | NO: 955) | (SEQ ID |
| | | | NO: 373) | SV | NO: 761) | | NO: 1149) |
| | | | | (SEQ ID | | | |
| | | | | NO: 567) | | | |
| 12 | AIP- | GFTFSMAWMS | RIKSVTDGET | TSSFCCRGGS | SGSSSNIGSS | KNNQRPS | STWDDSLSVR |
| | 128195 | (SEQ ID | TDYAAPVKG | CPSHDTSYCG | SV | (SEQ ID | V |
| | | NO: 180) | (SEQ ID | GQYKSYYYMD | (SEQ ID | NO: 956) | (SEQ ID |
| | | | NO: 374) | SV | NO: 762) | | NO: 1150) |
| | | | | (SEQ ID | | | |
| | | | | NO: 568) | | | |
| 13 | AIP- | GFTFSAAWMS | RIKSVTDGET | TSSFCCRGGS | SGSSSNIGSS | KNNORPS | STWDDSLSVR |
| | 116579 | (SEQ ID | TDYAAPVKG | CPSHDTSYCG | SV | (SEQ ID | V |
| | | NO: 181) | (SEQ ID | GQYKSYYYMD | (SEQ ID | NO: 957) | (SEQ ID |
| | | | NO: 375) | SV | NO: 763) | | NO: 1151) |
| | | | | (SEQ ID | | | |
| | | | | NO: 569) | | | |
| 14 | AIP- | GFTFSHAWMS | RIKSVTDGET | TSSFCCRGGS | SGSSSNIGSS | KNNQRPS | STWDDSLSVR |
| | 192329 | (SEQ ID | TDYAAPVKG | CPSHDTSYCG | SVS | (SEQ ID | V |
| | | NO: 182) | (SEQ ID | GQYKSYYYMD | (SEQ ID | NO: 958) | (SEQ ID |
| | | | NO: 376) | V | NO: 764) | | NO: 1152) |
| | | | | (SEQ ID | | | |
| | | | | NO: 570) | | | |
| 15 | AIP- | GFTFSHAWMS | RIKSVTDGET | TSSFCCRGGS | SGSSSNIGSS | KNNORPS | STWDDSLSVR |
| | 192329 | (SEQ ID | TDYAAPVKG | CPSHDTSYCG | SV | (SEQ ID | V |
| | | NO: 183) | (SEQ ID | GQYKSYYYMD | (SEQ ID | NO: 959) | (SEQ ID |
| | | | NO: 377) | SV | NO: 765) | | NO: 1153) |
| | | | | (SEQ ID | | | |
| | | | | NO: 571) | | | |
| 16 | AIP- | GFTFSKAYMS | RIKSVTDGET | TSSFCCRGGS | SGSSSNIGSS | KNNQRPS | STWDDSLSVR |
| | 197809 | (SEQ ID | TDYAAPVKG | CPSHDTSYCG | SV | (SEQ ID | V |
| | | NO: 184) | (SEQ ID | GQYKSYYYMD | (SEQ ID | NO: 960) | (SEQ ID |
| | | | NO: 378) | SV | NO: 766) | | NO: 1154) |
| | | | | (SEQ ID | | | |
| | | | | NO: 572) | | | |
| 17 | AIP- | GFTFSKAWFS | RIKSVTDGET | TSSFCCRGGS | SGSSSNIGSS | KNNQRPS | STWDDSLSVR |
| | 142489 | (SEQ ID | TDYAAPVKG | CPSHDTSYCG | SV | (SEQ ID | V |
| | | NO: 185) | (SEQ ID | GQYKSYYYMD | (SEQ ID | NO: 961) | (SEQ ID |
| | | | NO: 379) | SV | NO: 767) | | NO: 1155) |
| | | | | (SEQ ID | | | |
| | | | | NO: 573) | | | |
| 18 | AIP- | GFTFSKAWMS | RIQSVTDGET | TSSFCCRGGS | SGSSSNIGSS | KNNORPS | STWDDSLSVR |
| | 148102 | (SEQ ID | TDYAAPVKG | CPSHDTSYCG | SVS | (SEQ ID | V |
| | | NO: 186) | (SEQ ID | GQYKSYYYMD | (SEQ ID | NO: 962) | (SEQ ID |
| | | | NO: 380) | V | NO: 768) | | NO: 1156) |
| | | | | (SEQ ID | | | |
| | | | | NO: 574) | | | |
| 19 | AIP- | GFTFSKAWMS | RIKAVTDGET | TSSFCCRGGS | SGSSSNIGSS | KNNQRPS | STWDDSLSVR |
| | 167726 | (SEQ ID | TDYAAPVKG | CPSHDTSYCG | SV | (SEQ ID | V |
| | | NO: 187) | (SEQ ID | GQYKSYYYMD | (SEQ ID | NO: 963) | (SEQ ID |
| | | | NO: 381) | SV | NO: 769) | | NO: 1157) |
| | | | | (SEQ ID | | | |
| | | | | NO: 575) | | | |
| 20 | AIP- | GFTFSKAWMS | RIKSATDGET | TSSFCCRGGS | SGSSSNIGSS | KNNQRPS | STWDDSLSVR |
| | 199834 | (SEQ ID | TDYAAPVKG | CPSHDTSYCG | SV | (SEQ ID | V |
| | | NO: 188) | (SEQ ID | GQYKSYYYMD | (SEQ ID | NO: 964) | (SEQ ID |
| | | | NO: 382) | SV | NO: 770) | | NO: 1158) |
| | | | | (SEQ ID | | | |
| | | | | NO: 576) | | | |
| 21 | AIP- | GFTFSKAWMS | RIKSNTDGET | TSSFCCRGGS | SGSSSNIGSS | KNNQRPS | STWDDSLSVR |
| | 143179 | (SEQ ID | TDYAAPVKG | CPSHDTSYCG | SVS | (SEQ ID | V |
| | | NO: 189) | (SEQ ID | GQYKSYYYMD | (SEQ ID | NO: 965) | (SEQ ID |
| | | | NO: 383) | V | NO: 771) | | NO: 1159) |
| | | | | (SEQ ID | | | |
| | | | | NO: 577) | | | |
| 22 | AIP- | GFTFSKAWMS | RIKSVHDGET | TSSFCCRGGS | SGSSSNIGSS | KNNORPS | STWDDSLSVR |
| | 195587 | (SEQ ID | TDYAAPVKG | CPSHDTSYCG | SVS | (SEQ ID | V |
| | | NO: 190) | (SEQ ID | GQYKSYYYMD | (SEQ ID | NO: 966) | (SEQ ID |
| | | | NO: 384) | V | NO: 772) | | NO: 1160) |
| | | | | (SEQ ID | | | |
| | | | | NO: 578) | | | |
| 23 | AIP- | GFTFSKAWMS | RIKSVDDGET | TSSFCCRGGS | SGSSSNIGSS | KNNORPS | STWDDSLSVR |
| | 153462 | (SEQ ID | TDYAAPVKG | CPSHDTSYCG | SVS | (SEQ ID | V |
| | | NO: 191) | (SEQ ID | GQYKSYYYMD | (SEQ ID | NO: 967) | (SEQ ID |
| | | | NO: 385) | V | NO: 773) | | NO: 1161) |
| | | | | (SEQ ID | | | |
| | | | | NO: 579) | | | |
| 24 | AIP- | GFTFSKAWMS | RIKSVQDGET | TSSFCCRGGS | SGSSSNIGSS | KNNQRPS | STWDDSLSVR |
| | 115363 | (SEQ ID | TDYAAPVKG | CPSHDTSYCG | SV | (SEQ ID | V |
| | | NO: 192) | (SEQ ID | GQYKSYYYMD | (SEQ ID | NO: 968) | (SEQ ID |
| | | | NO: 386) | SV | NO: 774) | | NO: 1162) |
| | | | | (SEQ ID | | | |
| | | | | NO: 580) | | | |
| 25 | AIP- | GFTFSKAWMS | RIKSVINGET | TSSFCCRGGS | SGSSSNIGSS | KNNORPS | STWDDSLSVR |
| | 151090 | (SEQ ID | TDYAAPVKG | CPSHDTSYCG | SV | (SEQ ID | V |
| | | NO: 193) | (SEQ ID | GQYKSYYYMD | (SEQ ID | NO: 969) | (SEQ ID |
| | | | NO: 387) | SV | NO: 775) | | NO: 1163) |
| | | | | (SEQ ID | | | |
| | | | | NO: 581) | | | |
| 26 | AIP- | GFTFSKAWMS | RIKSVTDAET | TSSFCCRGGS | SGSSSNIGSS | KNNQRPS | STWDDSLSVR |
| | 168083 | (SEQ ID | TDYAAPVKG | CPSHDTSYCG | SVS | (SEQ ID | V |
| | | NO: 194) | (SEQ ID | GQYKSYYYMD | (SEQ ID | NO: 970) | (SEQ ID |
| | | | NO: 388) | V | NO: 776) | | NO: 1164) |
| | | | | (SEQ ID | | | |
| | | | | NO: 582) | | | |
| 27 | AIP- | GFTFSKAWMS | RIKSVTDGOT | TSSFCCRGGS | SGSSSNIGSS | KNNORPS | STWDDSLSVR |
| | 161082 | (SEQ ID | TDYAAPVKG | CPSHDTSYCG | SV | (SEQ ID | V |
| | | NO: 195) | (SEQ ID | GQYKSYYYMD | (SEQ ID | NO: 971) | (SEQ ID |
| | | | NO: 389) | SV | NO: 777) | | NO: 1165) |
| | | | | (SEQ ID | | | |
| | | | | NO: 583) | | | |
| 28 | AIP- | GFTFSKAWMS | RIKSVTDGHT | TSSFCCRGGS | SGSSSNIGSS | KNNQRPS | STWDDSLSVR |
| | 114196 | (SEQ ID | TDYAAPVKG | CPSHDTSYCG | SV | (SEQ ID | V |
| | | NO: 196) | (SEQ ID | GQYKSYYYMD | (SEQ ID | NO: 972) | (SEQ ID |
| | | | NO: 390) | SV | NO: 778) | | NO: 1166) |
| | | | | (SEQ ID | | | |
| | | | | NO: 584) | | | |
| 29 | AIP- | GFTFSKAWMS | RIKSVTDGEQ | TSSFCCRGGS | SGSSSNIGSS | KNNQRPS | STWDDSLSVR |
| | 189338 | (SEQ ID | TDYAAPVKG | CPSHDTSYCG | SVS | (SEQ ID | V |
| | | NO: 197) | (SEQ ID | GQYKSYYYMD | (SEQ ID | NO: 973) | (SEQ ID |
| | | | NO: 391) | V | NO: 779) | | NO: 1167) |
| | | | | (SEQ ID | | | |
| | | | | NO: 585) | | | |
| 30 | AIP- | GFTFSKAWMS | RIKSVTDGEA | TSSFCCRGGS | SGSSSNIGSS | KNNORPS | STWDDSLSVR |
| | 183190 | (SEQ ID | TDYAAPVKG | CPSHDTSYCG | SV | (SEQ ID | V |
| | | NO: 198) | (SEQ ID | GQYKSYYYMD | (SEQ ID | NO: 974) | (SEQ ID |
| | | | NO: 392) | SV | NO: 780) | | NO: 1168) |
| | | | | (SEQ ID | | | |
| | | | | NO: 586) | | | |
| 31 | AIP- | GFTFSKAWMS | RIKSVTDGET | TSSFCCRGGS | SGSSSNIGSS | KNNQRPS | STWDDSLSVR |
| | 110143 | (SEQ ID | TDYASPVKG | CPSHDTSYCG | SVS | (SEQ ID | V |
| | | NO: 199) | (SEQ ID | GQYKSYYYMD | (SEQ ID | NO: 975) | (SEQ ID |
| | | | NO: 393) | V | NO: 781) | | NO: 1169) |
| | | | | (SEQ ID | | | |
| | | | | NO: 587) | | | |
| 32 | AIP- | GFTFSKAWMS | RIKSVTDGET | TSSFCCRGGS | SGSSSNIGSS | KNNORPS | STWDDSLSVR |
| | 147176 | (SEQ ID | TDYAAPVQG | CPSHDTSYCG | SV | (SEQ ID | V |
| | | NO: 200) | (SEQ ID | GQYKSYYYMD | (SEQ ID | NO: 976) | (SEQ ID |
| | | | NO: 394) | SV | NO: 782) | | NO: 1170) |
| | | | | (SEQ ID | | | |
| | | | | NO: 588) | | | |
| 33 | AIP- | GFTFSKAWMS | RIKSVTDGET | ISSFCCRGGS | SGSSSNIGSS | KNNORPS | STWDDSLSVR |
| | 134312 | (SEQ ID | TDYAAPVKG | CPSHDTSYCG | SV | (SEQ ID | V |
| | | NO: 201) | (SEQ ID | GQYKSYYYMD | (SEQ ID | NO: 977) | (SEQ ID |
| | | | NO: 395) | SV | NO: 783) | | NO: 1171) |
| | | | | (SEQ ID | | | |
| | | | | NO: 589) | | | |
| 34 | AIP- | GFTFSKAWMS | RIKSVTDGET | TTSFCCRGGS | SGSSSNIGSS | KNNQRPS | STWDDSLSVR |
| | 128243 | (SEQ ID | TDYAAPVKG | CPSHDTSYCG | SV | (SEQ ID | V |
| | | NO: 202) | (SEQ ID | GQYKSYYYMD | (SEQ ID | NO: 978) | (SEQ ID |
| | | | NO: 396) | SV | NO: 784) | | NO: 1172) |
| | | | | (SEQ ID | | | |
| | | | | NO: 590) | | | |
| 35 | AIP- | GFTFSKAWMS | RIKSVTDGET | TSPFCCRGGS | SGSSSNIGSS | KNNORPS | STWDDSLSVR |
| | 156172 | (SEQ ID | TDYAAPVKG | CPSHDTSYCG | SV | (SEQ ID | V |
| | | NO: 203) | (SEQ ID | GQYKSYYYMD | (SEQ ID | NO: 979) | (SEQ ID |
| | | | NO: 397) | SV | NO: 785) | | NO: 1173) |
| | | | | (SEQ ID | | | |
| | | | | NO: 591) | | | |
| 36 | AIP- | GFTFSKAWMS | RIKSVTDGET | TSAFCCRGGS | SGSSSNIGSS | KNNQRPS | STWDDSLSVR |
| | 147389 | (SEQ ID | TDYAAPVKG | CPSHDTSYCG | SVS | (SEQ ID | V |
| | | NO: 204) | (SEQ ID | GQYKSYYYMD | (SEQ ID | NO: 980) | (SEQ ID |
| | | | NO: 398) | V | NO: 786) | | NO: 1174) |
| | | | | (SEQ ID | | | |
| | | | | NO: 592) | | | |
| 37 | AIP- | GFTFSKAWMS | RIKSVTDGET | TSSYCCRGGS | SGSSSNIGSS | KNNQRPS | STWDDSLSVR |
| | 124314 | (SEQ ID | TDYAAPVKG | CPSHDTSYCG | SV | (SEQ ID | V |
| | | NO: 205) | (SEQ ID | GQYKSYYYMD | (SEQ ID | NO: 981) | (SEQ ID |
| | | | NO: 399) | SV | NO: 787) | | NO: 1175) |
| | | | | (SEQ ID | | | |
| | | | | NO: 593) | | | |
| 38 | AIP- | GFTFSKAWMS | RIKSVTDGET | TSSFCCLGGS | SGSSSNIGSS | KNNQRPS | STWDDSLSVR |
| | 185291 | (SEQ ID | TDYAAPVKG | CPSHDTSYCG | SV | (SEQ ID | V |
| | | NO: 206) | (SEQ ID | GQYKSYYYMD | (SEQ ID | NO: 982) | (SEQ ID |
| | | | NO: 400) | SV | NO: 788) | | NO: 1176) |
| | | | | (SEQ ID | | | |
| | | | | NO: 594) | | | |
| 39 | AIP- | GFTFSKAWMS | RIKSVTDGET | TSSFCCHGGS | SGSSSNIGSS | KNNORPS | STWDDSLSVR |
| | 135247 | (SEQ ID | TDYAAPVKG | CPSHDTSYCG | SV | (SEQ ID | V |
| | | NO: 207) | (SEQ ID | GQYKSYYYMD | (SEQ ID | NO: 983) | (SEQ ID |
| | | | NO: 401) | SV | NO: 789) | | NO: 1177) |
| | | | | (SEQ ID | | | |
| | | | | NO: 595) | | | |
| 40 | AIP- | GFTFSKAWMS | RIKSVTDGET | TSSFCCOGGS | SGSSSNIGSS | KNNQRPS | STWDDSLSVR |
| | 113513 | (SEQ ID | TDYAAPVKG | CPSHDTSYCG | SV | (SEQ ID | V |
| | | NO: 208) | (SEQ ID | GQYKSYYYMD | (SEQ ID | NO: 984) | (SEQ ID |
| | | | NO: 402) | SV | NO: 790) | | NO: 1178) |
| | | | | (SEQ ID | | | |
| | | | | NO: 596) | | | |
| 41 | AIP- | GFTFSKAWMS | RIKSVTDGET | TSSFCCRSGS | SGSSSNIGSS | KNNQRPS | STWDDSLSVR |
| | 102299 | (SEQ ID | TDYAAPVKG | CPSHDTSYCG | SV | (SEQ ID | V |
| | | NO: 209) | (SEQ ID | GQYKSYYYMD | (SEQ ID | NO: 985) | (SEQ ID |
| | | | NO: 403) | SV | NO: 791) | | NO: 1179) |
| | | | | (SEQ ID | | | |
| | | | | NO: 597) | | | |
| 42 | AIP- | GFTFSKAWMS | RIKSVTDGET | TSSFCCRGAS | SGSSSNIGSS | KNNORPS | STWDDSLSVR |
| | 179097 | (SEQ ID | TDYAAPVKG | CPSHDTSYCG | SV | (SEQ ID | V |
| | | NO: 210) | (SEQ ID | GQYKSYYYMD | (SEQ ID | NO: 986) | (SEQ ID |
| | | | NO: 404) | SV | NO: 792) | | NO: 1180) |
| | | | | (SEQ ID | | | |
| | | | | NO: 598) | | | |
| 43 | AIP- | GFTFSKAWMS | RIKSVTDGET | TSSFCCRGKS | SGSSSNIGSS | KNNORPS | STWDDSLSVR |
| | 109343 | (SEQ ID | TDYAAPVKG | CPSHDTSYCG | SV | (SEQ ID | V |
| | | NO: 211) | (SEQ ID | GQYKSYYYMD | (SEQ ID | NO: 987) | (SEQ ID |
| | | | NO: 405) | SV | NO: 793) | | NO: 1181) |
| | | | | (SEQ ID | | | |
| | | | | NO: 599) | | | |
| 44 | AIP- | GFTFSKAWMS | RIKSVTDGET | TSSFCCRGNS | SGSSSNIGSS | KNNORPS | STWDDSLSVR |
| | 119622 | (SEQ ID | TDYAAPVKG | CPSHDTSYCG | SV | (SEQ ID | V |
| | | NO: 212) | (SEQ ID | GQYKSYYYMD | (SEQ ID | NO: 988) | (SEQ ID |
| | | | NO: 406) | SV | NO: 794) | | NO: 1182) |
| | | | | (SEQ ID | | | |
| | | | | NO: 600) | | | |
| 45 | AIP- | GFTFSKAWMS | RIKSVTDGET | TSSFCCRGGN | SGSSSNIGSS | KNNQRPS | STWDDSLSVR |
| | 191735 | (SEQ ID | TDYAAPVKG | CPSHDTSYCG | SV | (SEQ ID | V |
| | | NO: 213) | (SEQ ID | GQYKSYYYMD | (SEQ ID | NO: 989) | (SEQ ID |
| | | | NO: 407) | SV | NO: 795) | | NO: 1183) |
| | | | | (SEQ ID | | | |
| | | | | NO: 601) | | | |
| 46 | AIP- | GFTFSKAWMS | RIKSVTDGET | TSSFCCRGGQ | SGSSSNIGSS | KNNORPS | STWDDSLSVR |
| | 157078 | (SEQ ID | TDYAAPVKG | CPSHDTSYCG | SV | (SEQ ID | V |
| | | NO: 214) | (SEQ ID | GQYKSYYYMD | (SEQ ID | NO: 990) | (SEQ ID |
| | | | NO: 408) | SV | NO: 796) | | NO: 1184) |
| | | | | (SEQ ID | | | |
| | | | | NO: 602) | | | |
| 47 | AIP- | GFTFSKAWMS | RIKSVTDGET | TSSFCCRGGA | SGSSSNIGSS | KNNORPS | STWDDSLSVR |
| | 153475 | (SEQ ID | TDYAAPVKG | CPSHDTSYCG | SVS | (SEQ ID | V |
| | | NO: 215) | (SEQ ID | GQYKSYYYMD | (SEQ ID | NO: 991) | (SEQ ID |
| | | | NO: 409) | V | NO: 797) | | NO: 1185) |
| | | | | (SEQ ID | | | |
| | | | | NO: 603) | | | |
| 48 | AIP- | GFTFSKAWMS | RIKSVTDGET | TSSFCCRGGS | SGSSSNIGSS | KNNORPS | STWDDSLSVR |
| | 133650 | (SEQ ID | TDYAAPVKG | CASHDTSYCG | SV | (SEQ ID | V |
| | | NO: 216) | (SEQ ID | GQYKSYYYMD | (SEQ ID | NO: 992) | (SEQ ID |
| | | | NO: 410) | SV | NO: 798) | | NO: 1186) |
| | | | | (SEQ ID | | | |
| | | | | NO: 604) | | | |
| 49 | AIP- | GFTFSKAWMS | RIKSVTDGET | TSSFCCRGGS | SGSSSNIGSS | KNNQRPS | STWDDSLSVR |
| | 190915 | (SEQ ID | TDYAAPVKG | CLSHDTSYCG | SV | (SEQ ID | V |
| | | NO: 217) | (SEQ ID | GQYKSYYYMD | (SEQ ID | NO: 993) | (SEQ ID |
| | | | NO: 411) | SV | NO: 799) | | NO: 1187) |
| | | | | (SEQ ID | | | |
| | | | | NO: 605) | | | |
| 50 | AIP- | GFTFSKAWMS | RIKSVTDGET | TSSFCCRGGS | SGSSSNIGSS | KNNORPS | STWDDSLSVR |
| | 105241 | (SEQ ID | TDYAAPVKG | CPAHDTSYCG | SV | (SEQ ID | V |
| | | NO: 218) | (SEQ ID | GQYKSYYYMD | (SEQ ID | NO: 994) | (SEQ ID |
| | | | NO: 412) | SV | NO: 800) | | NO: 1188) |
| | | | | (SEQ ID | | | |
| | | | | NO: 606) | | | |
| 51 | AIP- | GFTFSKAWMS | RIKSVTDGET | TSSFCCRGGS | SGSSSNIGSS | KNNQRPS | STWDDSLSVR |
| | 167400 | (SEQ ID | TDYAAPVKG | CPNHDTSYCG | SV | (SEQ ID | V |
| | | NO: 219) | (SEQ ID | GQYKSYYYMD | (SEQ ID | NO: 995) | (SEQ ID |
| | | | NO: 413) | SV | NO: 801) | | NO: 1189) |
| | | | | (SEQ ID | | | |
| | | | | NO: 607) | | | |
| 52 | AIP- | GFTFSKAWMS | RIKSVTDGET | TSSFCCRGGS | SGSSSNIGSS | KNNORPS | STWDDSLSVR |
| | 109729 | (SEQ ID | TDYAAPVKG | CPSSDTSYCG | SVS | (SEQ ID | V |
| | | NO: 220) | (SEQ ID | GQYKSYYYMD | (SEQ ID | NO: 996) | (SEQ ID |
| | | | NO: 414) | V | NO: 802) | | NO: 1190) |
| | | | | (SEQ ID | | | |
| | | | | NO: 608) | | | |
| 53 | AIP- | GFTFSKAWMS | RIKSVTDGET | TSSFCCRGGS | SGSSSNIGSS | KNNORPS | STWDDSLSVR |
| | 151709 | (SEQ ID | TDYAAPVKG | CPSQDTSYCG | SV | (SEQ ID | V |
| | | NO: 221) | (SEQ ID | GQYKSYYYMD | (SEQ ID | NO: 997) | (SEQ ID |
| | | | NO: 415) | SV | NO: 803) | | NO: 1191) |
| | | | | (SEQ ID | | | |
| | | | | NO: 609) | | | |
| 54 | AIP- | GFTFSKAWMS | RIKSVTDGET | TSSFCCRGGS | SGSSSNIGSS | KNNORPS | STWDDSLSVR |
| | 137169 | (SEQ ID | TDYAAPVKG | CPSHETSYCG | SVS | (SEQ ID | V |
| | | NO: 222) | (SEQ ID | GQYKSYYYMD | (SEQ ID | NO: 998) | (SEQ ID |
| | | | NO: 416) | V | NO: 804) | | NO: 1192) |
| | | | | (SEQ ID | | | |
| | | | | NO: 610) | | | |
| 55 | AIP- | GFTFSKAWMS | RIKSVTDGET | TSSFCCRGGS | SGSSSNIGSS | KNNORPS | STWDDSLSVR |
| | 199616 | (SEQ ID | TDYAAPVKG | CPSHDQSYCG | SV | (SEQ ID | V |
| | | NO: 223) | (SEQ ID | GQYKSYYYMD | (SEQ ID | NO: 999) | (SEQ ID |
| | | | NO: 417) | SV | NO: 805) | | NO: 1193) |
| | | | | (SEQ ID | | | |
| | | | | NO: 611) | | | |
| 56 | AIP- | GFTFSKAWMS | RIKSVTDGET | TSSFCCRGGS | SGSSSNIGSS | KNNORPS | STWDDSLSVR |
| | 189296 | (SEQ ID | TDYAAPVKG | CPSHDTSMCG | SV | (SEQ ID | V |
| | | NO: 224) | (SEQ ID | GQYKSYYYMD | (SEQ ID | NO: 1000) | (SEQ ID |
| | | | NO: 418) | SV | NO: 806) | | NO: 1194) |
| | | | | (SEQ ID | | | |
| | | | | NO: 612) | | | |
| 57 | AIP- | GFTFSKAWMS | RIKSVTDGET | TSSFCCRGGS | SGSSSNIGSS | KNNQRPS | STWDDSLSVR |
| | 152283 | (SEQ ID | TDYAAPVKG | CPSHDTSYCA | SV | (SEQ ID | V |
| | | NO: 225) | (SEQ ID | GQYKSYYYMD | (SEQ ID | NO: 1001) | (SEQ ID |
| | | | NO: 419) | SV | NO: 807) | | NO: 1195) |
| | | | | (SEQ ID | | | |
| | | | | NO: 613) | | | |
| 58 | AIP- | GFTFSKAWMS | RIKSVTDGET | TSSFCCRGGS | SGSSSNIGSS | KNNORPS | STWDDSLSVR |
| | 136628 | (SEQ ID | TDYAAPVKG | CPSHDTSYCN | SV | (SEQ ID | V |
| | | NO: 226) | (SEQ ID | GQYKSYYYMD | (SEQ ID | NO: 1002) | (SEQ ID |
| | | | NO: 420) | SV | NO: 808) | | NO: 1196) |
| | | | | (SEQ ID | | | |
| | | | | NO: 614) | | | |
| 59 | AIP- | GFTFSKAWMS | RIKSVTDGET | TSSFCCRGGS | SGSSSNIGSS | KNNORPS | STWDDSLSVR |
| | 100340 | (SEQ ID | TDYAAPVKG | CPSHDTSYCG | SV | (SEQ ID | V |
| | | NO: 227) | (SEQ ID | NQYKSYYYMD | (SEQ ID | NO: 1003) | (SEQ ID |
| | | | NO: 421) | SV | NO: 809) | | NO: 1197) |
| | | | | (SEQ ID | | | |
| | | | | NO: 615) | | | |
| 60 | AIP- | GFTFSKAWMS | RIKSVTDGET | TSSFCCRGGS | SGSSSNIGSS | KNNORPS | STWDDSLSVR |
| | 166959 | (SEQ ID | TDYAAPVKG | CPSHDTSYCG | SV | (SEQ ID | V |
| | | NO: 228) | (SEQ ID | AQYKSYYYMD | (SEQ ID | NO: 1004) | (SEQ ID |
| | | | NO: 422) | SV | NO: 810) | | NO: 1198) |
| | | | | (SEQ ID | | | |
| | | | | NO: 616) | | | |
| 61 | AIP- | GFTFSKAWMS | RIKSVTDGET | TSSFCCRGGS | SGSSSNIGSS | KNNORPS | STWDDSLSVR |
| | 190362 | (SEQ ID | TDYAAPVKG | CPSHDTSYCG | SV | (SEQ ID | V |
| | | NO: 229) | (SEQ ID | GSYKSYYYMD | (SEQ ID | NO: 1005) | (SEQ ID |
| | | | NO: 423) | SV | NO: 811) | | NO: 1199) |
| | | | | (SEQ ID | | | |
| | | | | NO: 617) | | | |
| 62 | AIP- | GFTFSKAWMS | RIKSVTDGET | TSSFCCRGGS | SGSSSNIGSS | KNNORPS | STWDDSLSVR |
| | 101601 | (SEQ ID | TDYAAPVKG | CPSHDTSYCG | SV | (SEQ ID | V |
| | | NO: 230) | (SEQ ID | GYYKSYYYMD | (SEQ ID | NO: 1006) | (SEQ ID |
| | | | NO: 424) | SV | NO: 812) | | NO: 1200) |
| | | | | (SEQ ID | | | |
| | | | | NO: 618) | | | |
| 63 | AIP- | GFTFSKAWMS | RIKSVTDGET | TSSFCCRGGS | SGSSSNIGSS | KNNORPS | STWDDSLSVR |
| | 159023 | (SEQ ID | TDYJAAPVKG | CPSHDTSYCG | SV | (SEQ ID | V |
| | | NO: 231) | (SEQ ID | GOFKSYYYMD | (SEQ ID | NO: 1007) | (SEQ ID |
| | | | NO: 425) | SV | NO: 813) | | NO: 1201) |
| | | | | (SEQ ID | | | |
| | | | | NO: 619) | | | |
| 64 | AIP- | GFTFSKAWMS | RIKSVTDGET | TSSFCCRGGS | SGSSSNIGSS | KNNORPS | STWDDSLSVR |
| | 146871 | (SEQ ID | TDYAAPVKG | CPSHDTSYCG | SV | (SEQ ID | V |
| | | NO: 232) | (SEQ ID | GQYPSYYYMD | (SEQ ID | NO: 1008) | (SEQ ID |
| | | | NO: 426) | SV | NO: 814) | | NO: 1202) |
| | | | | (SEQ ID | | | |
| | | | | NO: 620) | | | |
| 65 | AIP- | GFTFSKAWMS | RIKSVTDGET | TSSFCCRGGS | SGSSSNIGSS | KNNORPS | STWDDSLSVR |
| | 170053 | (SEQ ID | TDYAAPVKG | CPSHDTSYCG | SV | (SEQ ID | V |
| | | NO: 233) | (SEQ ID | GOYASYYYMD | (SEQ ID | NO: 1009) | (SEQ ID |
| | | | NO: 427) | SV | NO: 815) | | NO: 1203) |
| | | | | (SEQ ID | | | |
| | | | | NO: 621) | | | |
| 66 | AIP- | GFTFSKAWMS | RIKSVTDGET | TSSFCCRGGS | SGSSSNIGSS | KNNORPS | STWDDSLSVR |
| | 199483 | (SEQ ID | TDYAAPVKG | CPSHDTSYCG | SVS | (SEQ ID | V |
| | | NO: 234) | (SEQ ID | GQYQSYYYMD | (SEQ ID | NO: 1010) | (SEQ ID |
| | | | NO: 428) | V | NO: 816) | | NO: 1204) |
| | | | | (SEQ ID | | | |
| | | | | NO: 622) | | | |
| 67 | AIP- | GFTFSKAWMS | RIKSVTDGET | TSSFCCRGGS | SGSSSNIGSS | KNNORPS | STWDDSLSVR |
| | 161048 | (SEQ ID | TDYAAPVKG | CPSHDTSYCG | SV | (SEQ ID | V |
| | | NO: 235) | (SEQ ID | GQYKDYYYMD | (SEQ ID | NO: 1011) | (SEQ ID |
| | | | NO: 429) | SV | NO: 817) | | NO: 1205) |
| | | | | (SEQ ID | | | |
| | | | | NO: 623) | | | |
| 68 | AIP- | GFTFSKAWMS | RIKSVTDGET | TSSFCCRGGS | SGSSSNIGSS | KNNORPS | STWDDSLSVR |
| | 162041 | (SEQ ID | TDYAAPVKG | CPSHDTSYCG | SV | (SEQ ID | V |
| | | NO: 236) | (SEQ ID | GQYKSFYYMD | (SEQ ID | NO: 1012) | (SEQ ID |
| | | | NO: 430) | SV | NO: 818) | | NO: 1206) |
| | | | | (SEQ ID | | | |
| | | | | NO: 624) | | | |
| 69 | AIP- | GFTFSKAWMS | RIKSVTDGET | TSSFCCRGGS | SGSSSNIGSS | KNNORPS | STWDDSLSVR |
| | 197886 | (SEQ ID | TDYJAAPVKG | CPSHDTSYCG | SV | (SEQ ID | V |
| | | NO: 237) | (SEQ ID | GQYKSYFYMD | (SEQ ID | NO: 1013) | (SEQ ID |
| | | | NO: 431) | SV | NO: 819) | | NO: 1207) |
| | | | | (SEQ ID | | | |
| | | | | NO: 625) | | | |
| 70 | AIP- | GFTFSKAWMS | RIKSVTDGET | TSSFCCRGGS | SGSSSNIGSS | KNNORPS | STWDDSLSVR |
| | 183133 | (SEQ ID | TDYAAPVKG | CPSHDTSYCG | SV | (SEQ ID | V |
| | | NO: 238) | (SEQ ID | GQYKSYYWMD | (SEQ ID | NO: 1014) | (SEQ ID |
| | | | NO: 432) | SV | NO: 820) | | NO: 1208) |
| | | | | (SEQ ID | | | |
| | | | | NO: 626) | | | |
| 71 | AIP- | GFTFSKAWMS | RIKSVTDGET | TSSFCCRGGS | SGSSSNIGSS | KNNQRPS | STWDDSLSVR |
| | 191470 | (SEQ ID | TDYAAPVKG | CPSHDTSYCG | SV | (SEQ ID | V |
| | | NO: 239) | (SEQ ID | GQYKSYYLMD | (SEQ ID | NO: 1015) | (SEQ ID |
| | | | NO: 433) | SV | NO: 821) | | NO: 1209) |
| | | | | (SEQ ID | | | |
| | | | | NO: 627) | | | |
| 72 | AIP- | GFTFSKAWMS | RIKSVTDGET | TSSFCCRGGS | SGSSSNIGSS | KNNORPS | STWDDSLSVR |
| | 151167 | (SEQ ID | TDYAAPVKG | CPSHDTSYCG | SV | (SEQ ID | V |
| | | NO: 240) | (SEQ ID | GQYKSYYYVD | (SEQ ID | NO: 1016) | (SEQ ID |
| | | | NO: 434) | SV | NO: 822) | | NO: 1210) |
| | | | | (SEQ ID | | | |
| | | | | NO: 628) | | | |
| 73 | AIP- | GFTFSKAWMS | RIKSVTDGET | TSSFCCRGGS | SGSSSNIGSS | KNNORPS | STWDDSLSVR |
| | 106633 | (SEQ ID | TDYAAPVKG | CPSHDTSYCG | SV | (SEQ ID | V |
| | | NO: 241) | (SEQ ID | GQYKSYYYFD | (SEQ ID | NO: 1017) | (SEQ ID |
| | | | NO: 435) | SV | NO: 823) | | NO: 1211) |
| | | | | (SEQ ID | | | |
| | | | | NO: 629) | | | |
| 74 | AIP- | GFTFSKAWMS | RIKSVTDGET | TSSFCCRGGS | SGSSSNIGSS | KNNORPS | STWDDSLSVR |
| | 102624 | (SEQ ID | TDYAAPVKG | CPSHDTSYCG | SVS | (SEQ ID | V |
| | | NO: 242) | (SEQ ID | GQYKSYYYMN | (SEQ ID | NO: 1018) | (SEQ ID |
| | | | NO: 436) | V | NO: 824) | | NO: 1212) |
| | | | | (SEQ ID | | | |
| | | | | NO: 630) | | | |
| 75 | AIP- | GFTFSKAWMS | RIKSVTDGET | TSSFCCRGGS | SGSSSNIGSS | KNNORPS | STWDDSLSVR |
| | 109484 | (SEQ ID | TDYAAPVKG | CPSHDTSYCG | SVS | (SEQ ID | V |
| | | NO: 243) | (SEQ ID | GQYKSYYYMD | (SEQ ID | NO: 1019) | (SEQ ID |
| | | | NO: 437) | I | NO: 825) | | NO: 1213) |
| | | | | (SEQ ID | | | |
| | | | | NO: 631) | | | |
| 76 | AIP- | GFTFSKAWMS | RIKSVTDGET | TSSFCCRGGS | SGSSSNIGSS | KNNQRPS | STWDDSLSVR |
| | 164754 | (SEQ ID | TDYAAPVKG | CPSHDTSYCG | SV | (SEQ ID | V |
| | | NO: 244) | (SEQ ID | GQYKSYYYMD | (SEQ ID | NO: 1020) | (SEQ ID |
| | | | NO: 438) | SP | NO: 826) | | NO: 1214) |
| | | | | (SEQ ID | | | |
| | | | | NO: 632) | | | |
| 77 | AIP- | GFTFSKAWMS | RIKSVTDGET | TSSFCCRGGS | SGSSSNIGSS | KNNORPS | STWDDSLSVR |
| | 169676 | (SEQ ID | TDYAAPVKG | CPSHDTSYCG | SV | (SEQ ID | V |
| | | NO: 245) | (SEQ ID | GQFKDYYYMD | (SEQ ID | NO: 1021) | (SEQ ID |
| | | | NO: 439) | SV | NO: 827) | | NO: 1215) |
| | | | | (SEQ ID | | | |
| | | | | NO: 633) | | | |
| 78 | AIP- | GFTFSKAWMS | RIKSVTDGET | TSSFCCRGGS | SGSSSNIGSS | KNNQRPS | STWDDSLSVR |
| | 177584 | (SEQ ID | TDYAAPVKG | CPSHDTSYCG | SVS | (SEQ ID | V |
| | | NO: 246) | (SEQ ID | GOSKQYYYMD | (SEQ ID | NO: 1022) | (SEQ ID |
| | | | NO: 440) | V | NO: 828) | | NO: 1216) |
| | | | | (SEQ ID | | | |
| | | | | NO: 634) | | | |
| 79 | AIP- | GFTFSKAWMS | RIKSVTDGET | TSSFCCRGGS | SGSSSNIGSS | KNNQRPS | STWDDSLSVR |
| | 174676 | (SEQ ID | TDYAAPVKG | CPSHDTSYCG | SV | (SEQ ID | V |
| | | NO: 247) | (SEQ ID | GQSKKYYYMD | (SEQ ID | NO: 1023) | (SEQ ID |
| | | | NO: 441) | SV | NO: 829) | | NO: 1217) |
| | | | | (SEQ ID | | | |
| | | | | NO: 635) | | | |
| 80 | AIP- | GFTFSKAWMS | RIKSVTDGET | TSSFSCRGGS | SGSSSNIGSS | KNNQRPS | STWDDSLSVR |
| | 120546 | (SEQ ID | TDYAAPVKG | CPSHDTSYSG | SV | (SEQ ID | V |
| | | NO: 248) | (SEQ ID | GQYKSYYYMD | (SEQ ID | NO: 1024) | (SEQ ID |
| | | | NO: 442) | SV | NO: 830) | | NO: 1218) |
| | | | | (SEQ ID | | | |
| | | | | NO: 636) | | | |
| 81 | AIP- | GFTFSKAWMS | RIKSVTDGET | TSSFACRGGS | SGSSSNIGSS | KNNORPS | STWDDSLSVR |
| | 186435 | (SEQ ID | TDYAAPVKG | CPSHDTSYVG | SVS | (SEQ ID | V |
| | | NO: 249) | (SEQ ID | GQYKSYYYMD | (SEQ ID | NO: 1025) | (SEQ ID |
| | | | NO: 443) | V | NO: 831) | | NO: 1219) |
| | | | | (SEQ ID | | | |
| | | | | NO: 637) | | | |
| 82 | AIP- | GFTFSKAWMS | RIKSVTDGET | TSSFCCRGNS | SGSSSNIGSS | KNNORPS | STWDDSLSVR |
| | 171074 | (SEQ ID | TDYAAPVKG | CPAHDTSYCG | SV | (SEQ ID | V |
| | | NO: 250) | (SEQ ID | GQYPSYYYMD | (SEQ ID | NO: 1026) | (SEQ ID |
| | | | NO: 444) | SV | NO: 832) | | NO: 1220) |
| | | | | (SEQ ID | | | |
| | | | | NO: 638) | | | |
| 83 | AIP- | GFTFSKAWMS | RIKSVTDGET | TSSYCCLGGS | SGSSSNIGSS | KNNORPS | STWDDSLSVR |
| | 163039 | (SEQ ID | TDYAAPVKG | CPSHDTSYCG | SVS | (SEQ ID | V |
| | | NO: 251) | (SEQ ID | GSYKSYYYMD | (SEQ ID | NO: 1027) | (SEQ ID |
| | | | NO: 445) | V | NO: 833) | | NO: 1221) |
| | | | | (SEQ ID | | | |
| | | | | NO: 639) | | | |
| 84 | AIP- | GFTFSKAWMS | RIKSVTDGET | TSSFCCRGKS | SGSSSNIGSS | KNNORPS | STWDDSLSVR |
| | 147652 | (SEQ ID | TDYAAPVKG | CPSHDNSYCG | SV | (SEQ ID | V |
| | | NO: 252) | (SEQ ID | GQYASYYYMD | (SEQ ID | NO: 1028) | (SEQ ID |
| | | | NO: 446) | SV | NO: 834) | | NO: 1222) |
| | | | | (SEQ ID | | | |
| | | | | NO: 640) | | | |
| 85 | AIP- | GFTFSKAWMS | RIKSVTDGET | TSSYCCRGGS | SGSSSNIGSS | KNNORPS | STWDDSLSVR |
| | 182061 | (SEQ ID | TDYAAPVKG | CPSHDTSYCG | SV | (SEQ ID | V |
| | | NO: 253) | (SEQ ID | GQFKSYYYMD | (SEQ ID | NO: 1029) | (SEQ ID |
| | | | NO: 447) | SP | NO: 835) | | NO: 1223) |
| | | | | (SEQ ID | | | |
| | | | | NO: 641) | | | |
| 86 | AIP- | GFTFSKAWMS | RIKSVTDGET | TSTFCCRGGS | SGSSSNIGSS | KNNQRPS | STWDDSLSVR |
| | 172643 | (SEQ ID | TDYAAPVKG | CLSHDTSYCG | SV | (SEQ ID | V |
| | | NO: 254) | (SEQ ID | GQYKSYYWMD | (SEQ ID | NO: 1030) | (SEQ ID |
| | | | NO: 448) | SV | NO: 836) | | NO: 1224) |
| | | | | (SEQ ID | | | |
| | | | | NO: 642) | | | |
| 87 | AIP- | GFDFSKAWMS | RIKSVTDGOT | TSSFCCRGGS | TGSSSNIGSS | KNNQRPS | STWDDSLSVR |
| | 171912 | (SEQ ID | TDYAAPVKG | CPSHDTSYCG | SVS | (SEQ ID | V |
| | | NO: 255) | (SEQ ID | GQYKSYYYMD | (SEQ ID | NO: 1031) | (SEQ ID |
| | | | NO: 449) | V | NO: 837) | | NO: 1225) |
| | | | | (SEQ ID | | | |
| | | | | NO: 643) | | | |
| 88 | AIP- | GFTFAKAWMS | RIKSVTDGET | TSSFCCRGGS | SGSSTNIGSS | KNNYRPS | STWDDSLSVR |
| | 167833 | (SEQ ID | TDYJAAPVKG | CPSHDTSYCG | SVS | (SEQ ID | V |
| | | NO: 256) | (SEQ ID | GQYKSYYYMD | (SEQ ID | NO: 1032) | (SEQ ID |
| | | | NO: 450) | V | NO: 838) | | NO: 1226) |
| | | | | (SEQ ID | | | |
| | | | | NO: 644) | | | |
| 89 | AIP- | GFDASKAWFT | RIKSVTDGET | TSSFCCRGGS | SGSSSNIGSS | KNNORPS | STWDDSLSVR |
| | 145518 | (SEQ ID | TDYAAPVKG | CPSHDTSYCG | SVS | (SEQ ID | V |
| | | NO: 257) | (SEQ ID | GQYKSYYYMD | (SEQ ID | NO: 1033) | (SEQ ID |
| | | | NO: 451) | V | NO: 839) | | NO: 1227) |
| | | | | (SEQ ID | | | |
| | | | | NO: 645) | | | |
| 90 | AIP- | GFTFSKAWMS | RIKSVTDGET | TSSFCCRGGS | TGSSSNIGSS | KNNORPS | STWDDSLSVR |
| | 143155 | (SEQ ID | TDYAAPVKG | CPSHDTSYCG | SV | (SEQ ID | V |
| | | NO: 258) | (SEQ ID | GQYKSYYYMD | (SEQ ID | NO: 1034) | (SEQ ID |
| | | | NO: 452) | SV | NO: 840) | | NO: 1228) |
| | | | | (SEQ ID | | | |
| | | | | NO: 646) | | | |
| 91 | AIP- | GFTFSKAWMS | RIKSVTDGET | TSSFCCRGGS | SGASSNIGSS | KNNORPS | STWDDSLSVR |
| | 119664 | (SEQ ID | TDYAAPVKG | CPSHDTSYCG | SVS | (SEQ ID | V |
| | | NO: 259) | (SEQ ID | GQYKSYYYMD | (SEQ ID | NO: 1035) | (SEQ ID |
| | | | NO: 453) | V | NO: 841) | | NO: 1229) |
| | | | | (SEQ ID | | | |
| | | | | NO: 647) | | | |
| 92 | AIP- | GFTFSKAWMS | RIKSVTDGET | TSSFCCRGGS | SGSPSNIGSS | KNNQRPS | STWDDSLSVR |
| | 190526 | (SEQ ID | TDYAAPVKG | CPSHDTSYCG | SV | (SEQ ID | V |
| | | NO: 260) | (SEQ ID | GQYKSYYYMD | (SEQ ID | NO: 1036) | (SEQ ID |
| | | | NO: 454) | SV | NO: 842) | | NO: 1230) |
| | | | | (SEQ ID | | | |
| | | | | NO: 648) | | | |
| 93 | AIP- | GFTFSKAWMS | RIKSVTDGET | TSSFCCRGGS | SGSKSNIGSS | KNNORPS | STWDDSLSVR |
| | 114403 | (SEQ ID | TDYAAPVKG | CPSHDTSYCG | SV | (SEQ ID | V |
| | | NO: 261) | (SEQ ID | GQYKSYYYMD | (SEQ ID | NO: 1037) | (SEQ ID |
| | | | NO: 455) | SV | NO: 843) | | NO: 1231) |
| | | | | (SEQ ID | | | |
| | | | | NO: 649) | | | |
| 94 | AIP- | GFTFSKAWMS | RIKSVTDGET | TSSFCCRGGS | SGSSTNIGSS | KNNORPS | STWDDSLSVR |
| | 156760 | (SEQ ID | TDYAAPVKG | CPSHDTSYCG | SV | (SEQ ID | V |
| | | NO: 262) | (SEQ ID | GQYKSYYYMD | (SEQ ID | NO: 1038) | (SEQ ID |
| | | | NO: 456) | SV | NO: 844) | | NO: 1232) |
| | | | | (SEQ ID | | | |
| | | | | NO: 650) | | | |
| 95 | AIP- | GFTFSKAWMS | RIKSVTDGET | TSSFCCRGGS | SGSSSDIGSS | KNNORPS | STWDDSLSVR |
| | 103803 | (SEQ ID | TDYAAPVKG | CPSHDTSYCG | SV | (SEQ ID | V |
| | | NO: 263) | (SEQ ID | GQYKSYYYMD | (SEQ ID | NO: 1039) | (SEQ ID |
| | | | NO: 457) | SV | NO: 845) | | NO: 1233) |
| | | | | (SEQ ID | | | |
| | | | | NO: 651) | | | |
| 96 | AIP- | GFTFSKAWMS | RIKSVTDGET | TSSFCCRGGS | SGSSSNIQSS | KNNORPS | STWDDSLSVR |
| | 182722 | (SEQ ID | TDYAAPVKG | CPSHDTSYCG | SV | (SEQ ID | V |
| | | NO: 264) | (SEQ ID | GQYKSYYYMD | (SEQ ID | NO: 1040) | (SEQ ID |
| | | | NO: 458) | SV | NO: 846) | | NO: 1234) |
| | | | | (SEQ ID | | | |
| | | | | NO: 652) | | | |
| 97 | AIP- | GFTFSKAWMS | RIKSVTDGET | TSSFCCRGGS | SGSSSNIGHS | KNNORPS | STWDDSLSVR |
| | 195588 | (SEQ ID | TDYAAPVKG | CPSHDTSYCG | SV | (SEQ ID | V |
| | | NO: 265) | (SEQ ID | GQYKSYYYMD | (SEQ ID | NO: 1041) | (SEQ ID |
| | | | NO: 459) | SV | NO: 847) | | NO: 1235) |
| | | | | (SEQ ID | | | |
| | | | | NO: 653) | | | |
| 98 | AIP- | GFTFSKAWMS | RIKSVTDGET | TSSFCCRGGS | SGSSSNIGST | KNNQRPS | STWDDSLSVR |
| | 145722 | (SEQ ID | TDYAAPVKG | CPSHDTSYCG | SV | (SEQ ID | V |
| | | NO: 266) | (SEQ ID | GQYKSYYYMD | (SEQ ID | NO: 1042) | (SEQ ID |
| | | | NO: 460) | SV | NO: 848) | | NO: 1236) |
| | | | | (SEQ ID | | | |
| | | | | NO: 654) | | | |
| 99 | AIP- | GFTFSKAWMS | RIKSVTDGET | TSSFCCRGGS | SGSSSNIGSN | KNNORPS | STWDDSLSVR |
| | 178251 | (SEQ ID | TDYAAPVKG | CPSHDTSYCG | SV | (SEQ ID | V |
| | | NO: 267) | (SEQ ID | GQYKSYYYMD | (SEQ ID | NO: 1043) | (SEQ ID |
| | | | NO: 461) | SV | NO: 849) | | NO: 1237) |
| | | | | (SEQ ID | | | |
| | | | | NO: 655) | | | |
| 100 | AIP- | GFTFSKAWMS | RIKSVTDGET | TSSFCCRGGS | SGSSSNIGSA | KNNORPS | STWDDSLSVR |
| | 116142 | (SEQ ID | TDYAAPVKG | CPSHDTSYCG | SV | (SEQ ID | V |
| | | NO: 268) | (SEQ ID | GQYKSYYYMD | (SEQ ID | NO: 1044) | (SEQ ID |
| | | | NO: 462) | SV | NO: 850) | | NO: 1238) |
| | | | | (SEQ ID | | | |
| | | | | NO: 656) | | | |
| 101 | AIP- | GFTFSKAWMS | RIKSVTDGET | TSSFCCRGGS | SGSSSNIGSS | KNNORPS | STWDDSLSVR |
| | 183350 | (SEQ ID | TDYAAPVKG | CPSHDTSYCG | TV | (SEQ ID | V |
| | | NO: 269) | (SEQ ID | GQYKSYYYMD | (SEQ ID | NO: 1045) | (SEQ ID |
| | | | NO: 463) | SV | NO: 851) | | NO: 1239) |
| | | | | (SEQ ID | | | |
| | | | | NO: 657) | | | |
| 102 | AIP- | GFTFSKAWMS | RIKSVTDGET | TSSFCCRGGS | SGSSSNIGSS | KNNQRPS | STWDDSLSVR |
| | 127108 | (SEQ ID | TDYAAPVKG | CPSHDTSYCG | AV | (SEQ ID | V |
| | | NO: 270) | (SEQ ID | GQYKSYYYMD | (SEQ ID | NO: 1046) | (SEQ ID |
| | | | NO: 464) | SV | NO: 852) | | NO: 1240) |
| | | | | (SEQ ID | | | |
| | | | | NO: 658) | | | |
| 103 | AIP- | GFTFSKAWMS | RIKSVTDGET | TSSFCCRGGS | SGSSSNIGSS | KNNORPS | STWDDSLSVR |
| | 128147 | (SEQ ID | TDYAAPVKG | CPSHDTSYCG | YV | (SEQ ID | V |
| | | NO: 271) | (SEQ ID | GQYKSYYYMD | (SEQ ID | NO: 1047) | (SEQ ID |
| | | | NO: 465) | SV | NO: 853) | | NO: 1241) |
| | | | | (SEQ ID | | | |
| | | | | NO: 659) | | | |
| 104 | AIP- | GFTFSKAWMS | RIKSVTDGET | TSSFCCRGGS | SGSSSNIGSS | KNNORPS | STWDDSLSVR |
| | 109510 | (SEQ ID | TDYAAPVKG | CPSHDTSYCG | ST | (SEQ ID | V |
| | | NO: 272) | (SEQ ID | GQYKSYYYMD | (SEQ ID | NO: 1048) | (SEQ ID |
| | | | NO: 466) | SV | NO: 854) | | NO: 1242) |
| | | | | (SEQ ID | | | |
| | | | | NO: 660) | | | |
| 105 | AIP- | GFTFSKAWMS | RIKSVTDGET | TSSFCCRGGS | SGSSSNIGSS | KNNORPS | STWDDSLSVR |
| | 104086 | (SEQ ID | TDYAAPVKG | CPSHDTSYCG | SV | (SEQ ID | V |
| | | NO: 273) | (SEQ ID | GQYKSYYYMD | (SEQ ID | NO: 1049) | (SEQ ID |
| | | | NO: 467) | AV | NO: 855) | | NO: 1243) |
| | | | | (SEQ ID | | | |
| | | | | NO: 661) | | | |
| 106 | AIP- | GFTFSKAWMS | RIKSVTDGET | TSSFCCRGGS | SGSSSNIGSS | KNNQRPS | STWDDSLSVR |
| | 143132 | (SEQ ID | TDYAAPVKG | CPSHDTSYCG | SV | (SEQ ID | V |
| | | NO: 274) | (SEQ ID | GQYKSYYYMD | (SEQ ID | NO: 1050) | (SEQ ID |
| | | | NO: 468) | TV | NO: 856) | | NO: 1244) |
| | | | | (SEQ ID | | | |
| | | | | NO: 662) | | | |
| 107 | AIP- | GFTFSKAWMS | RIKSVTDGET | TSSFCCRGGS | SGSSSNIGSS | RNNQRPS | STWDDSLSVR |
| | 169636 | (SEQ ID | TDYAAPVKG | CPSHDTSYCG | SV | (SEQ ID | V |
| | | NO: 275) | (SEQ ID | GQYKSYYYMD | (SEQ ID | NO: 1051) | (SEQ ID |
| | | | NO: 469) | SV | NO: 857) | | NO: 1245) |
| | | | | (SEQ ID | | | |
| | | | | NO: 663) | | | |
| 108 | AIP- | GFTFSKAWMS | RIKSVTDGET | TSSFCCRGGS | SGSSSNIGSS | NNNORPS | STWDDSLSVR |
| | 152243 | (SEQ ID | TDYAAPVKG | CPSHDTSYCG | SVS | (SEQ ID | V |
| | | NO: 276) | (SEQ ID | GQYKSYYYMD | (SEQ ID | NO: 1052) | (SEQ ID |
| | | | NO: 470) | V | NO: 858) | | NO: 1246) |
| | | | | (SEQ ID | | | |
| | | | | NO: 664) | | | |
| 109 | AIP- | GFTFSKAWMS | RIKSVTDGET | TSSFCCRGGS | SGSSSNIGSS | MNNQRPS | STWDDSLSVR |
| | 138776 | (SEQ ID | TDYAAPVKG | CPSHDTSYCG | SV | (SEQ ID | V |
| | | NO: 277) | (SEQ ID | GQYKSYYYMD | (SEQ ID | NO: 1053) | (SEQ ID |
| | | | NO: 471) | SV | NO: 859) | | NO: 1247) |
| | | | | (SEQ ID | | | |
| | | | | NO: 665) | | | |
| 110 | AIP- | GFTFSKAWMS | RIKSVTDGET | TSSFCCRGGS | SGSSSNIGSS | ANNQRPS | STWDDSLSVR |
| | 103817 | (SEQ ID | TDYAAPVKG | CPSHDTSYCG | SVS | (SEQ ID | V |
| | | NO: 278) | (SEQ ID | GQYKSYYYMD | (SEQ ID | NO: 1054) | (SEQ ID |
| | | | NO: 472) | V | NO: 860) | | NO: 1248) |
| | | | | (SEQ ID | | | |
| | | | | NO: 666) | | | |
| 111 | AIP- | GFTFSKAWMS | RIKSVTDGET | TSSFCCRGGS | SGSSSNIGSS | HINNORPS | STWDDSLSVR |
| | 130491 | (SEQ ID | TDYAAPVKG | CPSHDTSYCG | SVS | (SEQ ID | V |
| | | NO: 279) | (SEQ ID | GQYKSYYYMD | (SEQ ID | NO: 1055) | (SEQ ID |
| | | | NO: 473) | V | NO: 861) | | NO: 1249) |
| | | | | (SEQ ID | | | |
| | | | | NO: 667) | | | |
| 112 | AIP- | GFTFSKAWMS | RIKSVTDGET | TSSFCCRGGS | SGSSSNIGSS | KDNORPS | STWDDSLSVR |
| | 188155 | (SEQ ID | TDYAAPVKG | CPSHDTSYCG | SV | (SEQ ID | V |
| | | NO: 280) | (SEQ ID | GQYKSYYYMD | (SEQ ID | NO: 1056) | (SEQ ID |
| | | | NO: 474) | SV | NO: 862) | | NO: 1250) |
| | | | | (SEQ ID | | | |
| | | | | NO: 668) | | | |
| 113 | AIP- | GFTFSKAWMS | RIKSVTDGET | TSSFCCRGGS | SGSSSNIGSS | KNTORPS | STWDDSLSVR |
| | 167246 | (SEQ ID | TDYAAPVKG | CPSHDTSYCG | SV | (SEQ ID | V |
| | | NO: 281) | (SEQ ID | GQYKSYYYMD | (SEQ ID | NO: 1057) | (SEQ ID |
| | | | NO: 475) | SV | NO: 863) | | NO: 1251) |
| | | | | (SEQ ID | | | |
| | | | | NO: 669) | | | |
| 114 | AIP- | GFTFSKAWMS | RIKSVTDGET | TSSFCCRGGS | SGSSSNIGSS | KNNYRPS | STWDDSLSVR |
| | 106139 | (SEQ ID | TDYAAPVKG | CPSHDTSYCG | SV | (SEQ ID | V |
| | | NO: 282) | (SEQ ID | GQYKSYYYMD | (SEQ ID | NO: 1058) | (SEQ ID |
| | | | NO: 476) | SV | NO: 864) | | NO: 1252) |
| | | | | (SEQ ID | | | |
| | | | | NO: 670) | | | |
| 115 | AIP- | GFTFSKAWMS | RIKSVTDGET | TSSFCCRGGS | SGSSSNIGSS | KNNARPS | STWDDSLSVR |
| | 198351 | (SEQ ID | TDYAAPVKG | CPSHDTSYCG | SV | (SEQ ID | V |
| | | NO: 283) | (SEQ ID | GQYKSYYYMD | (SEQ ID | NO: 1059) | (SEQ ID |
| | | | NO: 477) | SV | NO: 865) | | NO: 1253) |
| | | | | (SEQ ID | | | |
| | | | | NO: 671) | | | |
| 116 | AIP- | GFTFSKAWMS | RIKSVTDGET | TSSFCCRGGS | SGSSSNIGSS | KNNLRPS | STWDDSLSVR |
| | 159326 | (SEQ ID | TDYJAAPVKG | CPSHDTSYCG | SVS | (SEQ ID | V |
| | | NO: 284) | (SEQ ID | GQYKSYYYMD | (SEQ ID | NO: 1060) | (SEQ ID |
| | | | NO: 478) | V | NO: 866) | | NO: 1254) |
| | | | | (SEQ ID | | | |
| | | | | NO: 672) | | | |
| 117 | AIP- | GFTFSKAWMS | RIKSVTDGET | TSSFCCRGGS | SGSSSNIGSS | KNNQQPS | STWDDSLSVR |
| | 192275 | (SEQ ID | TDYJAAPVKG | CPSHDTSYCG | SV | (SEQ ID | V |
| | | NO: 285) | (SEQ ID | GQYKSYYYMD | (SEQ ID | NO: 1061) | (SEQ ID |
| | | | NO: 479) | SV | NO: 867) | | NO: 1255) |
| | | | | (SEQ ID | | | |
| | | | | NO: 673) | | | |
| 118 | AIP- | GFTFSKAWMS | RIKSVTDGET | TSSFCCRGGS | SGSSSNIGSS | KNNORAS | STWDDSLSVR |
| | 190761 | (SEQ ID | TDYAAPVKG | CPSHDTSYCG | SV | (SEQ ID | V |
| | | NO: 286) | (SEQ ID | GQYKSYYYMD | (SEQ ID | NO: 1062) | (SEQ ID |
| | | | NO: 480) | SV | NO: 868) | | NO: 1256) |
| | | | | (SEQ ID | | | |
| | | | | NO: 674) | | | |
| 119 | AIP- | GFTFSKAWMS | RIKSVTDGET | TSSFCCRGGS | SGSSSNIGSS | KNNQRPY | STWDDSLSVR |
| | 166832 | (SEQ ID | TDYAAPVKG | CPSHDTSYCG | SV | (SEQ ID | V |
| | | NO: 287) | (SEQ ID | GQYKSYYYMD | (SEQ ID | NO: 1063) | (SEQ ID |
| | | | NO: 481) | SV | NO: 869) | | NO: 1257) |
| | | | | (SEQ ID | | | |
| | | | | NO: 675) | | | |
| 120 | AIP- | GFTFSKAWMS | RIKSVTDGET | TSSFCCRGGS | SGSSSNIGSS | KNNORPL | STWDDSLSVR |
| | 148062 | (SEQ ID | TDYAAPVKG | CPSHDTSYCG | SV | (SEQ ID | V |
| | | NO: 288) | (SEQ ID | GQYKSYYYMD | (SEQ ID | NO: 1064) | (SEQ ID |
| | | | NO: 482) | SV | NO: 870) | | NO: 1258) |
| | | | | (SEQ ID | | | |
| | | | | NO: 676) | | | |
| 121 | AIP- | GFTFSKAWMS | RIKSVTDGET | TSSFCCRGGS | SGSSSNIGSS | KNNQRPS | ATWDDSLSVR |
| | 129145 | (SEQ ID | TDYAAPVKG | CPSHDTSYCG | SVS | (SEQ ID | V |
| | | NO: 289) | (SEQ ID | GQYKSYYYMD | (SEQ ID | NO: 1065) | (SEQ ID |
| | | | NO: 483) | V | NO: 871) | | NO: 1259) |
| | | | | (SEQ ID | | | |
| | | | | NO: 677) | | | |
| 122 | AIP- | GFTFSKAWMS | RIKSVTDGET | TSSFCCRGGS | SGSSSNIGSS | KNNORPS | SSWDDSLSVR |
| | 111240 | (SEQ ID | TDYAAPVKG | CPSHDTSYCG | SVS | (SEQ ID | V |
| | | NO: 290) | (SEQ ID | GQYKSYYYMD | (SEQ ID | NO: 1066) | (SEQ ID |
| | | | NO: 484) | V | NO: 872) | | NO: 1260) |
| | | | | (SEQ ID | | | |
| | | | | NO: 678) | | | |
| 123 | AIP- | GFTFSKAWMS | RIKSVTDGET | TSSFCCRGGS | SGSSSNIGSS | KNNORPS | STFDDSLSVR |
| | 190749 | (SEQ ID | TDYAAPVKG | CPSHDTSYCG | SV | (SEQ ID | V |
| | | NO: 291) | (SEQ ID | GQYKSYYYMD | (SEQ ID | NO: 1067) | (SEQ ID |
| | | | NO: 485) | SV | NO: 873) | | NO: 1261) |
| | | | | (SEQ ID | | | |
| | | | | NO: 679) | | | |
| 124 | AIP- | GFTFSKAWMS | RIKSVTDGET | TSSFCCRGGS | SGSSSNIGSS | KNNQRPS | STWDNSLSVR |
| | 153888 | (SEQ ID | TDYAAPVKG | CPSHDTSYCG | SVS | (SEQ ID | V |
| | | NO: 292) | (SEQ ID | GQYKSYYYMD | (SEQ ID | NO: 1068) | (SEQ ID |
| | | | NO: 486) | V | NO: 874) | | NO: 1262) |
| | | | | (SEQ ID | | | |
| | | | | NO: 680) | | | |
| 125 | AIP- | GFTFSKAWMS | RIKSVTDGET | TSSFCCRGGS | SGSSSNIGSS | KNNORPS | STWDDQLSVR |
| | 130915 | (SEQ ID | TDYAAPVKG | CPSHDTSYCG | SVS | (SEQ ID | V |
| | | NO: 293) | (SEQ ID | GQYKSYYYMD | (SEQ ID | NO: 1069) | (SEQ ID |
| | | | NO: 487) | V | NO: 875) | | NO: 1263) |
| | | | | (SEQ ID | | | |
| | | | | NO: 681) | | | |
| 126 | AIP- | GFTFSKAWMS | RIKSVTDGET | TSSFCCRGGS | SGSSSNIGSS | KNNQRPS | STWDDALSVR |
| | 109048 | (SEQ ID | TDYAAPVKG | CPSHDTSYCG | SVS | (SEQ ID | V |
| | | NO: 294) | (SEQ ID | GQYKSYYYMD | (SEQ ID | NO: 1070) | (SEQ ID |
| | | | NO: 488) | V | NO: 876) | | NO: 1264) |
| | | | | (SEQ ID | | | |
| | | | | NO: 682) | | | |
| 127 | AIP- | GFTFSKAWMS | RIKSVTDGET | TSSFCCRGGS | SGSSSNIGSS | KNNORPS | STWDDDLSVR |
| | 170569 | (SEQ ID | TDYAAPVKG | CPSHDTSYCG | SV | (SEQ ID | V |
| | | NO: 295) | (SEQ ID | GQYKSYYYMD | (SEQ ID | NO: 1071) | (SEQ ID |
| | | | NO: 489) | SV | NO: 877) | | NO: 1265) |
| | | | | (SEQ ID | | | |
| | | | | NO: 683) | | | |
| 128 | AIP- | GFTFSKAWMS | RIKSVTDGET | TSSFCCRGGS | SGSSSNIGSS | KNNORPS | STWDDSNSVR |
| | 154873 | (SEQ ID | TDYAAPVKG | CPSHDTSYCG | SV | (SEQ ID | V |
| | | NO: 296) | (SEQ ID | GQYKSYYYMD | (SEQ ID | NO: 1072) | (SEQ ID |
| | | | NO: 490) | SV | NO: 878) | | NO: 1266) |
| | | | | (SEQ ID | | | |
| | | | | NO: 684) | | | |
| 129 | AIP- | GFTFSKAWMS | RIKSVTDGET | TSSFCCRGGS | SGSSSNIGSS | KNNORPS | STWDDSSSVR |
| | 159037 | (SEQ ID | TDYAAPVKG | CPSHDTSYCG | SV | (SEQ ID | V |
| | | NO: 297) | (SEQ ID | GQYKSYYYMD | (SEQ ID | NO: 1073) | (SEQ ID |
| | | | NO: 491) | SV | NO: 879) | | NO: 1267) |
| | | | | (SEQ ID | | | |
| | | | | NO: 685) | | | |
| 130 | AIP- | GFTFSKAWMS | RIKSVTDGET | TSSFCCRGGS | SGSSSNIGSS | KNNORPS | STWDDSLNVR |
| | 186826 | (SEQ ID | TDYAAPVKG | CPSHDTSYCG | SVS | (SEQ ID | V |
| | | NO: 298) | (SEQ ID | GQYKSYYYMD | (SEQ ID | NO: 1074) | (SEQ ID |
| | | | NO: 492) | V | NO: 880) | | NO: 1268) |
| | | | | (SEQ ID | | | |
| | | | | NO: 686) | | | |
| 131 | AIP- | GFTFSKAWMS | RIKSVTDGET | TSSFCCRGGS | SGSSSNIGSS | KNNORPS | STWDDSLLVR |
| | 156514 | (SEQ ID | TDYJAAPVKG | CPSHDTSYCG | SV | (SEQ ID | V |
| | | NO: 299) | (SEQ ID | GQYKSYYYMD | (SEQ ID | NO: 1075) | (SEQ ID |
| | | | NO: 493) | SV | NO: 881) | | NO: 1269) |
| | | | | (SEQ ID | | | |
| | | | | NO: 687) | | | |
| 132 | AIP- | GFTFSKAWMS | RIKSVTDGET | TSSFCCRGGS | SGSSSNIGSS | KNNORPS | STWDDSLTVR |
| | 157122 | (SEQ ID | TDYAAPVKG | CPSHDTSYCG | SV | (SEQ ID | V |
| | | NO: 300) | (SEQ ID | GQYKSYYYMD | (SEQ ID | NO: 1076) | (SEQ ID |
| | | | NO: 494) | SV | NO: 882) | | NO: 1270) |
| | | | | (SEQ ID | | | |
| | | | | NO: 688) | | | |
| 133 | AIP- | GFTFSKAWMS | RIKSVTDGET | TSSFCCRGGS | SGSSSNIGSS | KNNORPS | STWDDSLSIR |
| | 173276 | (SEQ ID | TDYAAPVKG | CPSHDTSYCG | SV | (SEQ ID | V |
| | | NO: 301) | (SEQ ID | GQYKSYYYMD | (SEQ ID | NO: 1077) | (SEQ ID |
| | | | NO: 495) | SV | NO: 883) | | NO: 1271) |
| | | | | (SEQ ID | | | |
| | | | | NO: 689) | | | |
| 134 | AIP- | GFTFSKAWMS | RIKSVTDGET | TSSFCCRGGS | SGSSSNIGSS | KNNQRPS | STWDDSLSVK |
| | 150485 | (SEQ ID | TDYAAPVKG | CPSHDTSYCG | SV | (SEQ ID | V |
| | | NO: 302) | (SEQ ID | GQYKSYYYMD | (SEQ ID | NO: 1078) | (SEQ ID |
| | | | NO: 496) | SV | NO: 884) | | NO: 1272) |
| | | | | (SEQ ID | | | |
| | | | | NO: 690) | | | |
| 135 | AIP- | GFTFSKAWMS | RIKSVTDGET | TSSFCCRGGS | SGSSSNIGSS | KNNORPS | STWDDSLSVW |
| | 135679 | (SEQ ID | TDYAAPVKG | CPSHDTSYCG | SVS | (SEQ ID | V |
| | | NO: 303) | (SEQ ID | GQYKSYYYMD | (SEQ ID | NO: 1079) | (SEQ ID |
| | | | NO: 497) | V | NO: 885) | | NO: 1273) |
| | | | | (SEQ ID | | | |
| | | | | NO: 691) | | | |
| 136 | AIP- | GFTFSKAWMS | RIKSVTDGET | TSSFCCRGGS | SGSSSNIGSS | KNNQRPS | STWDDSLSVH |
| | 166847 | (SEQ ID | TDYAAPVKG | CPSHDTSYCG | SV | (SEQ ID | V |
| | | NO: 304) | (SEQ ID | GQYKSYYYMD | (SEQ ID | NO: 1080) | (SEQ ID |
| | | | NO: 498) | SV | NO: 886) | | NO: 1274) |
| | | | | (SEQ ID | | | |
| | | | | NO: 692) | | | |
| 137 | AIP- | GFTFSKAWMS | RIKSVTDGET | TSSFCCRGGS | SGSSSNIGSS | KNNORPS | STWDDSLSVQ |
| | 124013 | (SEQ ID | TDYAAPVKG | CPSHDTSYCG | SV | (SEQ ID | V |
| | | NO: 305) | (SEQ ID | GQYKSYYYMD | (SEQ ID | NO: 1081) | (SEQ ID |
| | | | NO: 499) | SV | NO: 887) | | NO: 1275) |
| | | | | (SEQ ID | | | |
| | | | | NO: 693) | | | |
| 138 | AIP- | GFTFSKAWMS | RIKSVTDGET | TSSFCCRGGS | SGSSSNIGSS | KNNORPS | STWDDSLSVR |
| | 126285 | (SEQ ID | TDYAAPVKG | CPSHDTSYCG | SVS | (SEQ ID | I |
| | | NO: 306) | (SEQ ID | GQYKSYYYMD | (SEQ ID | NO: 1082) | (SEQ ID |
| | | | NO: 500) | V | NO: 888) | | NO: 1276) |
| | | | | (SEQ ID | | | |
| | | | | NO: 694) | | | |
| 139 | AIP- | GFTFSKAWMS | RIKSVTDGET | TSSFCCRGGS | SGSSSDIGSS | KNNORPS | STWNDQLSVR |
| | 190274 | (SEQ ID | TDYAAPVKG | CPSHDTSYCG | SVS | (SEQ ID | V |
| | | NO: 307) | (SEQ ID | GQYKSYYYMD | (SEQ ID | NO: 1083) | (SEQ ID |
| | | | NO: 501) | V | NO: 889) | | NO: 1277) |
| | | | | (SEQ ID | | | |
| | | | | NO: 695) | | | |
| 140 | AIP- | GFTFSKAWMS | RIKSVTDGET | TSSFCCRGGS | HGSESDIGSH | KNNQRPS | STWDDSLSVR |
| | 150277 | (SEQ ID | TDYAAPVKG | CPSHDTSYCG | DV | (SEQ ID | V |
| | | NO: 308) | (SEQ ID | GQYKSYYYMD | (SEQ ID | NO: 1084) | (SEQ ID |
| | | | NO: 502) | LV | NO: 890) | | NO: 1278) |
| | | | | (SEQ ID | | | |
| | | | | NO: 696) | | | |
| 141 | AIP- | GFTFSKAWYS | RIKSVTDGET | TSSFCCRGGS | SGSSSNIGSS | KNNORPS | STWDDSLSVR |
| | 104364 | (SEQ ID | TDYAAPVKG | CPSHDTSYCG | SVS | (SEQ ID | V |
| | | NO: 309) | (SEQ ID | GQYKSYYYMD | (SEQ ID | NO: 1085) | (SEQ ID |
| | | | NO: 503) | V | NO: 891) | | NO: 1279) |
| | | | | (SEQ ID | | | |
| | | | | NO: 697) | | | |
| 142 | AIP- | GFTFSKAWMS | RIKSVTDGET | TSSFCCRGGS | SGSSSNIGSS | KNNQRPS | STWDDSLSVR |
| | 180422 | (SEQ ID | TEYAASVKG | CPSHDTSYCG | SV | (SEQ ID | V |
| | | NO: 310) | (SEQ ID | GQYKSYYYMD | (SEQ ID | NO: 1086) | (SEQ ID |
| | | | NO: 504) | SV | NO: 892) | | NO: 1280) |
| | | | | (SEQ ID | | | |
| | | | | NO: 698) | | | |
| 143 | AIP- | GFTFSKAWMS | RIKSVTDGET | TSSFCCRGGS | SGSSSNIGSS | KNNORPS | STWDDSLSVR |
| | 166722 | (SEQ ID | TEYAASVKG | CPSHDTSYCG | SV | (SEQ ID | V |
| | | NO: 311) | (SEQ ID | GQYKSYYYMD | (SEQ ID | NO: 1087) | (SEQ ID |
| | | | NO: 505) | SV | NO: 893) | | NO: 1281) |
| | | | | (SEQ ID | | | |
| | | | | NO: 699) | | | |
| 144 | AIP- | GFTFSKAWMS | FIKSVTDGET | TSSFCCRGGS | SGSSSNIGSS | KNNORPS | STWDDSLSVR |
| | 193490 | (SEQ ID | TEYAASVKG | CPSHDTSYCG | SV | (SEQ ID | V |
| | | NO: 312) | (SEQ ID | GQYKSYYYMD | (SEQ ID | NO: 1088) | (SEQ ID |
| | | | NO: 506) | SV | NO: 894) | | NO: 1282) |
| | | | | (SEQ ID | | | |
| | | | | NO: 700) | | | |
| 145 | AIP- | GFTFSKAWMS | RIKSVTDGET | TSSYCCRSGS | SGSSSNIGSS | KNNORPS | STWDDSLSVR |
| | 129967 | (SEQ ID | TDYAAPVKG | CPSSDTSYCN | SV | (SEQ ID | V |
| | | NO: 313) | (SEQ ID | GQFKSYYYMD | (SEQ ID | NO: 1089) | (SEQ ID |
| | | | NO: 507) | SP | NO: 895) | | NO: 1283) |
| | | | | (SEQ ID | | | |
| | | | | NO: 701) | | | |
| 146 | AIP- | GFTFSKAWMS | RIKSVTDGET | TSSFCCRSGS | SGSSSNIGSS | KNNORPS | STWDDSLSVR |
| | 126175 | (SEQ ID | TDYAAPVKG | CPSSDTSYCN | SV | (SEQ ID | V |
| | | NO: 314) | (SEQ ID | GQYKSYYYVN | (SEQ ID | NO: 1090) | (SEQ ID |
| | | | NO: 508) | SI | NO: 896) | | NO: 1284) |
| | | | | (SEQ ID | | | |
| | | | | NO: 702) | | | |
| 147 | AIP- | GFTFSKAWMS | RIKSVTDGET | TTSFCCRGAS | SGSSSNIGSS | KNNORPS | STWDDSLSVR |
| | 180905 | (SEQ ID | TDYAAPVKG | CPSHDTSYCA | SV | (SEQ ID | V |
| | | NO: 315) | (SEQ ID | GSYKSYYYVN | (SEQ ID | NO: 1091) | (SEQ ID |
| | | | NO: 509) | SI | NO: 897) | | NO: 1285) |
| | | | | (SEQ ID | | | |
| | | | | NO: 703) | | | |
| 148 | AIP- | GFTFSKAWMS | RIKSVTDGET | TSAFCCRGKS | SGSSSNIGSS | KNNORPS | STWDDSLSVR |
| | 141706 | (SEQ ID | TDYAAPVKG | CPSSDTSYCG | SV | (SEQ ID | V |
| | | NO: 316) | (SEQ ID | GQYPSYYYVN | (SEQ ID | NO: 1092) | (SEQ ID |
| | | | NO: 510) | SI | NO: 898) | | NO: 1286) |
| | | | | (SEQ ID | | | |
| | | | | NO: 704) | | | |
| 149 | AIP- | GFTFSKAWMS | RIKSVTDGET | TSAFCCRGKS | SGSSSNIGSS | KNNORPS | STWDDSLSVR |
| | 105092 | (SEQ ID | TDYAAPVKG | CPSHDTSFCG | SV | (SEQ ID | V |
| | | NO: 317) | (SEQ ID | GODKRYYYVN | (SEQ ID | NO: 1093) | (SEQ ID |
| | | | NO: 511) | SI | NO: 899) | | NO: 1287) |
| | | | | (SEQ ID | | | |
| | | | | NO: 705) | | | |
| 150 | AIP- | GFTFSKAWMS | RIKSVTDGET | TSAFCCRGGN | SGSSSNIGSS | KNNORPS | STWDDSLSVR |
| | 152031 | (SEQ ID | TDYAAPVKG | CPSHETSYCN | SVS | (SEQ ID | V |
| | | NO: 318) | (SEQ ID | GONKQYYYMD | (SEQ ID | NO: 1094) | (SEQ ID |
| | | | NO: 512) | V | NO: 900) | | NO: 1288) |
| | | | | (SEQ ID | | | |
| | | | | NO: 706) | | | |
| 151 | AIP- | GFTFSKAWMS | RIKSVTDGET | TSSFCCRGNQ | SGSSSNIGSS | KNNORPS | STWDDSLSVR |
| | 163319 | (SEQ ID | TDYAAPVKG | CPSSDTSFCG | SV | (SEQ ID | V |
| | | NO: 319) | (SEQ ID | GODKRYYYMD | (SEQ ID | NO: 1095) | (SEQ ID |
| | | | NO: 513) | SP | NO: 901) | | NO: 1289) |
| | | | | (SEQ ID | | | |
| | | | | NO: 707) | | | |
| 152 | AIP- | GFTFSKAWMS | RIKSVTDGET | TTSFCCRGNQ | SGSSSNIGSS | KNNQRPS | STWDDSLSVR |
| | 160621 | (SEQ ID | TDYAAPVKG | CPSHETSYCG | SV | (SEQ ID | V |
| | | NO: 320) | (SEQ ID | GYYKSYFYMD | (SEQ ID | NO: 1096) | (SEQ ID |
| | | | NO: 514) | SV | NO: 902) | | NO: 1290) |
| | | | | (SEQ ID | | | |
| | | | | NO: 708) | | | |
| 153 | AIP- | GFTFSKAWMS | RIKSVTDGET | TSSYCCRGKQ | SGSSSNIGSS | KNNORPS | STWDDSLSVR |
| | 145212 | (SEQ ID | TDYAAPVKG | CPSHDTSYCA | SV | (SEQ ID | V |
| | | NO: 321) | (SEQ ID | GQYADYYYMD | (SEQ ID | NO: 1097) | (SEQ ID |
| | | | NO: 515) | SV | NO: 903) | | NO: 1291) |
| | | | | (SEQ ID | | | |
| | | | | NO: 709) | | | |
| 154 | AIP- | GFTFSKAWMS | RIKSVTDGET | ISSFCCRGKQ | SGSSSNIGSS | KNNORPS | STWDDSLSVR |
| | 112328 | (SEQ ID | TDYAAPVKG | CPSSDTSYCN | SV | (SEQ ID | V |
| | | NO: 322) | (SEQ ID | GQYADYYYMD | (SEQ ID | NO: 1098) | (SEQ ID |
| | | | NO: 516) | SV | NO: 904) | | NO: 1292) |
| | | | | (SEQ ID | | | |
| | | | | NO: 710) | | | |
| 155 | AIP- | GFTFSKAWMS | RIKSVTDGET | TSSFCCRGKQ | SGSSSNIGSS | KNNORPS | STWDDSLSVR |
| | 193106 | (SEQ ID | TDYAAPVKG | CPSSDTSYCN | SV | (SEQ ID | V |
| | | NO: 323) | (SEQ ID | GQYADYYYVN | (SEQ ID | NO: 1099) | (SEQ ID |
| | | | NO: 517) | SI | NO: 905) | | NO: 1293) |
| | | | | (SEQ ID | | | |
| | | | | NO: 711) | | | |
| 156 | AIP- | GFTFSKAWMS | RIKSVTDGET | ISSFCCRGKQ | SGSSSNIGSS | KNNQRPS | STWDDSLSVR |
| | 125062 | (SEQ ID | TDYAAPVKG | CPSSDTSFCG | SV | (SEQ ID | V |
| | | NO: 324) | (SEQ ID | GODKRYYFMD | (SEQ ID | NO: 1100) | (SEQ ID |
| | | | NO: 518) | SV | NO: 906) | | NO: 1294) |
| | | | | (SEQ ID | | | |
| | | | | NO: 712) | | | |
| 157 | AIP- | GFTFSKAWMS | RIKSVTDGET | TSAFCCRGKQ | SGSSSNIGSS | KNNORPS | STWDDSLSVR |
| | 124301 | (SEQ ID | TDYAAPVKG | CPSSDTSYCG | SV | (SEQ ID | V |
| | | NO: 325) | (SEQ ID | GQYASFYYMD | (SEQ ID | NO: 1101) | (SEQ ID |
| | | | NO: 519) | SV | NO: 907) | | NO: 1295) |
| | | | | (SEQ ID | | | |
| | | | | NO: 713) | | | |
| 158 | AIP- | GFTFSKAWMS | RIKSVTDGET | TSSFCCOGNN | SGSSSNIGSS | KNNORPS | STWDDSLSVR |
| | 124068 | (SEQ ID | TDYAAPVKG | CPSSDTSYCG | SV | (SEQ ID | V |
| | | NO: 326) | (SEQ ID | GYYKDYYYMD | (SEQ ID | NO: 1102) | (SEQ ID |
| | | | NO: 520) | SV | NO: 908) | | NO: 1296) |
| | | | | (SEQ ID | | | |
| | | | | NO: 714) | | | |
| 159 | AIP- | GFTFSKAWMS | RIKSVTDGET | TSSFCCOGNN | SGSSSNIGSS | KNNQRPS | STWDDSLSVR |
| | 144568 | (SEQ ID | TDYAAPVKG | CPSHDTSYCG | SV | (SEQ ID | V |
| | | NO: 327) | (SEQ ID | GQYKSYYYVN | (SEQ ID | NO: 1103) | (SEQ ID |
| | | | NO: 521) | SI | NO: 909) | | NO: 1297) |
| | | | | (SEQ ID | | | |
| | | | | NO: 715) | | | |
| 160 | AIP- | GFTFSKAWMS | RIKSVTDGET | TSSFCCOGKN | SGSSSNIGSS | KNNORPS | STWDDSLSVR |
| | 139782 | (SEQ ID | TDYAAPVKG | CPSHETSYCG | SVS | (SEQ ID | V |
| | | NO: 328) | (SEQ ID | GQYADYYYMD | (SEQ ID | NO: 1104) | (SEQ ID |
| | | | NO: 522) | V | NO: 910) | | NO: 1298) |
| | | | | (SEQ ID | | | |
| | | | | NO: 716) | | | |
| 161 | AIP- | GFTFSKAWMS | RIKSVTDGET | TTSFCCHGNS | SGSSSNIGSS | KNNQRPS | STWDDSLSVR |
| | 171543 | (SEQ ID | TDYAAPVKG | CPSSDTSYCG | SVS | (SEQ ID | V |
| | | NO: 329) | (SEQ ID | GONKQYYYMD | (SEQ ID | NO: 1105) | (SEQ ID |
| | | | NO: 523) | V | NO: 911) | | NO: 1299) |
| | | | | (SEQ ID | | | |
| | | | | NO: 717) | | | |
| 162 | AIP- | GFTFSKAWMS | RIKSVTDGET | ISSFCCHGNS | SGSSSNIGSS | KNNQRPS | STWDDSLSVR |
| | 140148 | (SEQ ID | TDYAAPVKG | CPSHDTSYCN | SVS | (SEQ ID | V |
| | | NO: 330) | (SEQ ID | GQNKQYYYMD | (SEQ ID | NO: 1106) | (SEQ ID |
| | | | NO: 524) | V | NO: 912) | | NO: 1300) |
| | | | | (SEQ ID | | | |
| | | | | NO: 718) | | | |
| 163 | AIP- | GFTFSKAWMS | RIKSVTDGET | ISSFCCHSNN | SGSSSNIGSS | KNNQRPS | STWDDSLSVR |
| | 177193 | (SEQ ID | TDYAAPVKG | CPSSDTSYCN | SVS | (SEQ ID | V |
| | | NO: 331) | (SEQ ID | GQYKQYYYMD | (SEQ ID | NO: 1107) | (SEQ ID |
| | | | NO: 525) | V | NO: 913) | | NO: 1301) |
| | | | | (SEQ ID | | | |
| | | | | NO: 719) | | | |
| 164 | AIP- | GFTFSKAWMS | RIKSVTDGET | TSSFCCHSNN | SGSSSNIGSS | KNNORPS | STWDDSLSVR |
| | 171348 | (SEQ ID | TDYAAPVKG | CPSHDTSYCG | SV | (SEQ ID | V |
| | | NO: 332) | (SEQ ID | GQYKSYYYVN | (SEQ ID | NO: 1108) | (SEQ ID |
| | | | NO: 526) | SI | NO: 914) | | NO: 1302) |
| | | | | (SEQ ID | | | |
| | | | | NO: 720) | | | |
| 165 | AIP- | GFTFSKAWMS | RIKSVTDGET | ISSFACHSNN | SGSSSNIGSS | KNNORPS | STWDDSLSVR |
| | 193088 | (SEQ ID | TDYAAPVKG | CPSSDTSYVN | SV | (SEQ ID | V |
| | | NO: 333) | (SEQ ID | GYYKQYYFMD | (SEQ ID | NO: 1109) | (SEQ ID |
| | | | NO: 527) | SV | NO: 915) | | NO: 1303) |
| | | | | (SEQ ID | | | |
| | | | | NO: 721) | | | |
| 166 | AIP- | GFTFSKAWMS | RIKSVTDGET | TSSFCCHSNN | SGSSSNIGSS | KNNORPS | STWDDSLSVR |
| | 182087 | (SEQ ID | TDYAAPVKG | CPSSDTSYCN | SV | (SEQ ID | V |
| | | NO: 334) | (SEQ ID | GQYKQYYYVN | (SEQ ID | NO: 1110) | (SEQ ID |
| | | | NO: 528) | SI | NO: 916) | | NO: 1304) |
| | | | | (SEQ ID | | | |
| | | | | NO: 722) | | | |
| 167 | AIP- | GFTFSKAWMS | RIKSVTDGET | TSSFCCLGKA | SGSSSNIGSS | KNNORPS | STWDDSLSVR |
| | 151388 | (SEQ ID | TDYAAPVKG | CLSHDTSYCG | SVS | (SEQ ID | V |
| | | NO: 335) | (SEQ ID | GQYASYYYVN | (SEQ ID | NO: 1111) | (SEQ ID |
| | | | NO: 529) | I | NO: 917) | | NO: 1305) |
| | | | | (SEQ ID | | | |
| | | | | NO: 723) | | | |
| 168 | AIP- | GFTFSKAWMS | RIKSVTDGET | TSSFCCLGKA | SGSSSNIGSS | KNNORPS | STWDDSLSVR |
| | 149787 | (SEQ ID | TDYAAPVKG | CLSSDTSYCG | SV | (SEQ ID | V |
| | | NO: 336) | (SEQ ID | GYYASYYFVN | (SEQ ID | NO: 1112) | (SEQ ID |
| | | | NO: 530) | SI | NO: 918) | | NO: 1306) |
| | | | | (SEQ ID | | | |
| | | | | NO: 724) | | | |
| 169 | AIP- | GFTFSKAWMS | RIKSVTDGET | TSSFACLGKA | SGSSSNIGSS | KNNORPS | STWDDSLSVR |
| | 126097 | (SEQ ID | TDYAAPVKG | CLSSDTSYVG | SV | (SEQ ID | V |
| | | NO: 337) | (SEQ ID | GYYASYYFVN | (SEQ ID | NO: 1113) | (SEQ ID |
| | | | NO: 531) | SI | NO: 919) | | NO: 1307) |
| | | | | (SEQ ID | | | |
| | | | | NO: 725) | | | |
| 170 | AIP- | GFTFSKAWMS | RIKSVTDGET | TSSYCCLGNS | SGSSSNIGSS | KNNORPS | STWDDSLSVR |
| | 107759 | (SEQ ID | TDYAAPVKG | CPSSDTSYCG | SV | (SEQ ID | V |
| | | NO: 338) | (SEQ ID | GOFKSYYYMD | (SEQ ID | NO: 1114) | (SEQ ID |
| | | | NO: 532) | SP | NO: 920) | | NO: 1308) |
| | | | | (SEQ ID | | | |
| | | | | NO: 726) | | | |
| 171 | AIP- | GFTFSKAWMS | RIKSVTDGET | TSSYCCLGNS | SGSSSNIGSS | KNNORPS | STWDDSLSVR |
| | 148484 | (SEQ ID | TDYAAPVKG | CPSSDTSFCG | SVS | (SEQ ID | V |
| | | NO: 339) | (SEQ ID | GODKRYYYMD | (SEQ ID | NO: 1115) | (SEQ ID |
| | | | NO: 533) | P | NO: 921) | | NO: 1309) |
| | | | | (SEQ ID | | | |
| | | | | NO: 727) | | | |
| 172 | AIP- | GFTFSKAWMS | RIKSVTDGET | ISSFCCLGGN | SGSSSNIGSS | KNNQRPS | STWDDSLSVR |
| | 186403 | (SEQ ID | TDYAAPVKG | CPSSETSYCG | SV | (SEQ ID | V |
| | | NO: 340) | (SEQ ID | NQYPSYYYMD | (SEQ ID | NO: 1116) | (SEQ ID |
| | | | NO: 534) | SV | NO: 922) | | NO: 1310) |
| | | | | (SEQ ID | | | |
| | | | | NO: 728) | | | |
| 173 | AIP- | GFTFSKAWMS | RIKSVTDGET | ISSFCCLGGN | SGSSSNIGSS | KNNQRPS | STWDDSLSVR |
| | 166629 | (SEQ ID | TDYAAPVKG | CPSSETSYCG | SV | (SEQ ID | V |
| | | NO: 341) | (SEQ ID | NYYPSYFYMD | (SEQ ID | NO: 1117) | (SEQ ID |
| | | | NO: 535) | SV | NO: 923) | | NO: 1311) |
| | | | | (SEQ ID | | | |
| | | | | NO: 729) | | | |
| 174 | AIP- | GFTFSKAWMS | RIKSVTDGET | TSSFCCLGGN | SGSSSNIGSS | KNNORPS | STWDDSLSVR |
| | 165276 | (SEQ ID | TDYAAPVKG | CPSSETSYCG | SV | (SEQ ID | V |
| | | NO: 342) | (SEQ ID | NQYPSYYYVN | (SEQ ID | NO: 1118) | (SEQ ID |
| | | | NO: 536) | SI | NO: 924) | | NO: 1312) |
| | | | | (SEQ ID | | | |
| | | | | NO: 730) | | | |
| 175 | AIP- | GFTFSKAWMS | RIKSVTDGET | TTSFACRGNQ | SGSSSNIGSS | KNNORPS | STWDDSLSVR |
| | 188293 | (SEQ ID | TDYAAPVKG | CPSHETSYVG | SV | (SEQ ID | V |
| | | NO: 343) | (SEQ ID | GYYKSYFYMD | (SEQ ID | NO: 1119) | (SEQ ID |
| | | | NO: 537) | SV | NO: 925) | | NO: 1313) |
| | | | | (SEQ ID | | | |
| | | | | NO: 731) | | | |
| 176 | AIP- | GFTFSKAWMS | RIKSVTDGET | TTSFACRGNO | SGSSSNIGSS | KNNORPS | STWDDSLSVR |
| | 109364 | (SEQ ID | TDYAAPVKG | CPSSETSYVG | SV | (SEQ ID | V |
| | | NO: 344) | (SEQ ID | GYYKSYFFMD | (SEQ ID | NO: 1120) | (SEQ ID |
| | | | NO: 538) | SV | NO: 926) | | NO: 1314) |
| | | | | (SEQ ID | | | |
| | | | | NO: 732) | | | |
| 177 | AIP- | GFTFSKAWMS | RIKSVTDGET | ISSFACRGKQ | SGSSSNIGSS | KNNQRPS | STWDDSLSVR |
| | 191805 | (SEQ ID | TDYAAPVKG | CPSSDTSYVG | SV | (SEQ ID | V |
| | | NO: 345) | (SEQ ID | GQFKSYYFMD | (SEQ ID | NO: 1121) | (SEQ ID |
| | | | NO: 539) | SV | NO: 927) | | NO: 1315) |
| | | | | (SEQ ID | | | |
| | | | | NO: 733) | | | |
| 178 | AIP- | GFTFAKAWMS | RIKAADDGKQ | TSSFCCRGGS | SGSSTNIGSS | KNNYRPS | STWDDSLSVR |
| | 181592 | (SEQ ID | TDYAAPVKG | CLSHDTSYCG | SVY | (SEQ ID | V |
| | | NO: 346) | (SEQ ID | GQYKSYYWMD | (SEQ ID | NO: 1122) | (SEQ ID |
| | | | NO: 540) | V | NO: 928) | | NO: 1316) |
| | | | | (SEQ ID | | | |
| | | | | NO: 734) | | | |
| 179 | AIP- | GFTYAKAWMS | RIKSVQDGEQ | TSSYCCLGGS | SGSSTNIGSS | KNNYRAS | STWDDSLSVR |
| | 155587 | (SEQ ID | TDYAAPVKG | CPSHDTSYCG | SVY | (SEQ ID | V |
| | | NO: 347) | (SEQ ID | GSYKSYYYMD | (SEQ ID | NO: 1123) | (SEQ ID |
| | | | NO: 541) | V | NO: 929) | | NO: 1317) |
| | | | | (SEQ ID | | | |
| | | | | NO: 735) | | | |
| 180 | AIP- | GFDASKAWFT | RIKSVTDGET | TSSFCCRGGS | TGSSSNIGSS | KNSLRPQ | STWDDSLSVR |
| | 147945 | (SEQ ID | TDYAAPVKG | CPSHDTSYCG | YVS | (SEQ ID | V |
| | | NO: 348) | (SEQ ID | GONKQYYYMD | (SEQ ID | NO: 1124) | (SEQ ID |
| | | | NO: 542) | V | NO: 930) | | NO: 1318) |
| | | | | (SEQ ID | | | |
| | | | | NO: 736) | | | |
| 181 | AIP- | GFDASKAWFT | RIKSVTDGET | TSSFACRGGS | TGSSSNIGSS | KNSLRPQ | STWDDSLSVR |
| | 199264 | (SEQ ID | TDYAAPVKG | CPSHDTSYVG | YVS | (SEQ ID | V |
| | | NO: 349) | (SEQ ID | GQYKSYYYMD | (SEQ ID | NO: 1125) | (SEQ ID |
| | | | NO: 543) | V | NO: 931) | | NO: 1319) |
| | | | | (SEQ ID | | | |
| | | | | NO: 737) | | | |
| 182 | AIP- | GFDASKAWFT | RIKSVTDGET | TSSYCCLGGS | TGSSSNIGSS | KNSLRPQ | STWDDSLSVR |
| | 123438 | (SEQ ID | TDYAAPVKG | CPSHDTSYCG | YV | (SEQ ID | V |
| | | NO: 350) | (SEQ ID | GSYKSYYYMD | (SEQ ID | NO: 1126) | (SEQ ID |
| | | | NO: 544) | SV | NO: 932) | | NO: 1320) |
| | | | | (SEQ ID | | | |
| | | | | NO: 738) | | | |
| 183 | AIP- | GFDASKAWFT | RIKSVTDGET | TSSFCCRGKS | TGSSSNIGSS | KNSLRPQ | STWDDSLSVR |
| | 151315 | (SEQ ID | TDYAAPVKG | CPSHDTSYCG | YV | (SEQ ID | V |
| | | NO: 351) | (SEQ ID | GOYASYYYMD | (SEQ ID | NO: 1127) | (SEQ ID |
| | | | NO: 545) | SV | NO: 933) | | NO: 1321) |
| | | | | (SEQ ID | | | |
| | | | | NO: 739) | | | |
| 184 | AIP- | GFTFSKAWMS | RIKAADDGKQ | TSSFCCRGGN | SGSPSNIGSA | KNNORPS | STWDDSLSVR |
| | 197785 | (SEQ ID | TDYAAPVKG | CPSHETSYCG | ST | (SEQ ID | V |
| | | NO: 352) | (SEQ ID | NQYKSYYYMD | (SEQ ID | NO: 1128) | (SEQ ID |
| | | | NO: 546) | SV | NO: 934) | | NO: 1322) |
| | | | | (SEQ ID | | | |
| | | | | NO: 740) | | | |
| 185 | AIP- | GFTFSKAWMS | RIKAADDGKQ | TSSFCCRSGS | SGSPSNIGSA | KNNQRPS | STWDDSLSVR |
| | 115782 | (SEQ ID | TDYAAPVKG | CPSSDTSYCN | STS | (SEQ ID | V |
| | | NO: 353) | (SEQ ID | GQYKSYYYMD | (SEQ ID | NO: 1129) | (SEQ ID |
| | | | NO: 547) | V | NO: 935) | | NO: 1323) |
| | | | | (SEQ ID | | | |
| | | | | NO: 741) | | | |
| 186 | AIP- | GFTFSKAWMS | RIKAADDGKQ | TSSFCCRGGS | SGSPSNIGSA | KNNORPS | STWDDSLSVR |
| | 138130 | (SEQ ID | TDYAAPVKG | CPSHDTSYCG | ST | (SEQ ID | V |
| | | NO: 354) | (SEQ ID | GQYKSYYYVN | (SEQ ID | NO: 1130) | (SEQ ID |
| | | | NO: 548) | SI | NO: 936) | | NO: 1324) |
| | | | | (SEQ ID | | | |
| | | | | NO: 742) | | | |
| 187 | AIP- | GFTFSKAWMS | RIKAADDGKQ | TTSFCCRGAS | SGSPSNIGSA | KNNORPS | STWDDSLSVR |
| | 170221 | (SEQ ID | TDYAAPVKG | CPSHDTSYCA | STS | (SEQ ID | V |
| | | NO: 355) | (SEQ ID | GSYKSYYYMD | (SEQ ID | NO: 1131) | (SEQ ID |
| | | | NO: 549) | V | NO: 937) | | NO: 1325) |
| | | | | (SEQ ID | | | |
| | | | | NO: 743) | | | |
| 188 | AIP- | GFTFSKAWMS | RIKAADDGKO | ISSFCCRGNS | SGSPSNIGSA | KNNORPS | STWDDSLSVR |
| | 167482 | (SEQ ID | TDYAAPVKG | CPSSDTSYCN | ST | (SEQ ID | V |
| | | NO: 356) | (SEQ ID | GQYKSYYYMD | (SEQ ID | NO: 1132) | (SEQ ID |
| | | | NO: 550) | SV | NO: 938) | | NO: 1326) |
| | | | | (SEQ ID | | | |
| | | | | NO: 744) | | | |
| 189 | AIP- | GFTFSKAWMS | RIKAVTDGHT | TSSFCCRGGS | SGASSNIGHS | RNNQQPL | STWDDALSIR |
| | 189475 | (SEQ ID | TDYAAPVKG | CPSHDTSYCG | SVY | (SEQ ID | V |
| | | NO: 357) | (SEQ ID | GQYKSYYYMD | (SEQ ID | NO: 1133) | (SEQ ID |
| | | | NO: 551) | V | NO: 939) | | NO: 1327) |
| | | | | (SEQ ID | | | |
| | | | | NO: 745) | | | |
| 190 | AIP- | GFVYSKAWMS | RIKSVTDGQA | TSSFCCRGGS | SGSSSNIGSS | KNTORAS | STWDDALNVR |
| | 102833 | (SEQ ID | TDYJAAPVKG | CPSHDTSYCG | SV | (SEQ ID | V |
| | | NO: 358) | (SEQ ID | GQYKSYYYMD | (SEQ ID | NO: 1134) | (SEQ ID |
| | | | NO: 552) | SV | NO: 940) | | NO: 1328) |
| | | | | (SEQ ID | | | |
| | | | | NO: 746) | | | |
| 191 | AIP- | GFVFSKAWMS | RIKSVTDGET | TSSFCCRGKS | SGSSSNIGSS | RNNQQPL | SSWDDSSLVR |
| | 173396 | (SEQ ID | TDYAAPVKG | CPSHDTSYCG | SV | (SEQ ID | V |
| | | NO: 359) | (SEQ ID | GQYASYYYMD | (SEQ ID | NO: 1135) | (SEQ ID |
| | | | NO: 553) | SV | NO: 941) | | NO: 1329) |
| | | | | (SEQ ID | | | |
| | | | | NO: 747) | | | |
| 192 | AIP- | GFTFAKAWMS | RIKSVTDAET | TSSFCCRSGS | SGSSSNIGSS | KNNARPS | ATWDNSLSIR |
| | 132355 | (SEQ ID | TDYAAPVKG | CPSSDTSYCN | SV | (SEQ ID | V |
| | | NO: 360) | (SEQ ID | GQYKSYYWMD | (SEQ ID | NO: 1136) | (SEQ ID |
| | | | NO: 554) | TV | NO: 942) | | NO: 1330) |
| | | | | (SEQ ID | | | |
| | | | | NO: 748) | | | |
| 193 | AIP- | GFTYAKAWFT | RIKSTSDGGI | TSSFCCRGGS | SGSKSNIGSS | KDNORAS | STWDDALSVR |
| | 118505 | (SEQ ID | TDYAAPVKG | CPSHDTSFCG | YV | (SEQ ID | V |
| | | NO: 361) | (SEQ ID | GQYKSYYYMD | (SEQ ID | NO: 1137) | (SEQ ID |
| | | | NO: 555) | SV | NO: 943) | | NO: 1331) |
| | | | | (SEQ ID | | | |
| | | | | NO: 749) | | | |
| 194 | AIP- | GFTFSKAWMS | RIKSVSDGET | TSSFCCRGGS | SGSSSNIGSS | KNNORPS | STWDDSLSVR |
| | 131972 | (SEQ ID | TDYAAPVKG | CPSRDTSYCG | SV | (SEQ ID | V |
| | | NO: 362) | (SEQ ID | GQYKSYYFMD | (SEQ ID | NO: 1138) | (SEQ ID |
| | | | NO: 556) | YV | NO: 944) | | NO: 1332) |
| | | | | (SEQ ID | | | |
| | | | | NO: 750) | | | |
| 195 | AIP- | GFTFSKAWMT | RIKSTSDGGI | TTSFCCRGGR | SGSSSNIGSS | KNNORPS | STWDDSLSVR |
| | 189526 | (SEQ ID | TDYAAPVKG | CPSRDTSFCG | SVS | (SEQ ID | V |
| | | NO: 171) | (SEQ ID | GQYNSYYYMD | (SEQ ID | NO: 1138) | (SEQ ID |
| | | | NO: 555) | V | NO: 941) | | NO: 1332) |
| | | | | (SEQ ID | | | |
| | | | | NO: 1727) | | | |

TABLE 3A

| | AIP | | |
|---|---|---|---|
| | Number | V_{H} Sequence | V_{L} Sequence |
| 1 | AIP- | EVQLVESGGALVKPGGSLRLSCAASGFTFSKAWMS | QSVLTQPPSASGTPGQRVTISCSGSSSNIGSSSVSWYQQLPG |
| | 131762 | WVRQAPGKGLEWVGRIKSVTDGETTDYAAPVKGRF | TAPKLLIYKNNQRPSGVPDRFSGSKSGTSASLAISGLRSEDE |
| | | TISRDDSKSTLYLQMNSLKTEDTAVYYCTSSFCGG | ADYYCSTWDDSLSVRVFGGGTKLTVL (SEQ ID NO: |
| | | PSHDTSYCGGQYKSYYYMDVWGKGTTVTVSS | 123) |
| | | (SEQ ID NO: 1747) | |
| 2 | AIP- | EVQLVESGGALVKPGGSLRLSCAASGFTFSKAWMS | QSVLTQPPSASGTPGQRVTISCSGSSSNIGSSSVSWYQQLPG |
| | 194564 | WVRQAPGKGLEWVGRIKSVTDGETTDYAAPVKGRF | TAPKLLIYKNNQRPSGVPDRFSGSKSGTSASLAISGLRSEDE |
| | | TISRDDSKSTLYLQMNSLKTEDTAVYYCTSSFCCR | ADYYCSTWDDSLSVRVFGGGTKLTVL (SEQ ID NO: |
| | | SGGSCPSHDTSYCGGQYKSYYYMDVWGKGTTVTVS | 123) |
| | | S (SEQ ID NO: 1748) | |
| 3 | AIP- | EVQLVESGGALVKPGGSLRLSCAASGFTFSKAWMS | QSVLTQPPSASGTPGQRVTISCSGSSSNIGSSSVSWYQQLPG |
| | 169752 | WVRQAPGKGLEWVGRIKSVTDGETTDYAAPVKGRF | TAPKLLIYKNNQRPSGVPDRFSGSKSGTSASLAISGLRSEDE |
| | | TISRDDSKSTLYLQMNSLKTEDTAVYYCTSSFCCR | ADYYCSTWDDSLSVRVFGGGTKLTVL (SEQ ID NO: |
| | | GGGSCPSHDTSYCGGQYKSYYYMDVWGKGTTVTVS | 123) |
| | | S (SEQ ID NO: 1749) | |
| 4 | AIP- | EVQLVESGGALVKPGGSLRLSCAASGFTFSKAWMS | QSVLTQPPSASGTPGORVTISCSGSSSNIGSSSVSWYQQLPG |
| | 185680 | WVRQAPGKGLEWVGRIKSVTDGETTDYAAPVKGRF | TAPKLLIYKNNQRPSGVPDRFSGSKSGTSASLAISGLRSEDE |
| | | TISRDDSKSTLYLOMNSLKTEDTAVYYCTSSFCCR | ADYYCSTWDDSLSVRVFGGGTKLTVL (SEQ ID NO: |
| | | GGGGSCPSHDTSYCGGQYKSYYYMDVWGKGTTVTV | 123) |
| | | SS (SEQ ID NO: 1750) | |
| 5 | AIP- | EVQLVESGGALVKPGGSLRLSCAASGFTFSKAWMS | QSVLTQPPSASGTPGQRVTISCSGSSSNIGSSSVSWYQQLPG |
| | 145328 | WVRQAPGKGLEWVGRIKSVTDGETTDYAAPVKGRF | TAPKLLIYKNNQRPSGVPDRFSGSKSGTSASLAISGLRSEDE |
| | | TISRDDSKSTLYLQMNSLKTEDTAVYYCTSSFCCR | ADYYCSTWDDSLSVRVFGGGTKLTVL (SEQ ID NO: |
| | | GGSGGSCPSHDTSYCGGQYKSYYYMDVWGKGTTVT | 123) |
| | | VSS (SEQ ID NO: 1751) | |
| 6 | AIP- | EVQLVESGGALVKPGGSLRLSCAASGFTFSKAWMS | QSVLTQPPSASGTPGQRVTISCSGSSSNIGSSSVSWYQQLPG |
| | 182606 | WVRQAPGKGLEWVGRIKSVTDGETTDYAAPVKGRF | TAPKLLIYKNNQRPSGVPDRFSGSKSGTSASLAISGLRSEDE |
| | | TISRDDSKSTLYLQMNSLKTEDTAVYYCTSSFSCR | ADYYCSTWDDSLSVRVFGGGTKLTVL (SEQ ID NO: |
| | | GGSCPSHDTSYGGQYKSYYYMDVWGKGTTVTVSS | 123) |
| | | (SEQ ID NO: 1752) | |
| 7 | AIP- | EVQLVESGGALVKPGGSLRLSCAASGFTFSKAWMS | QSVLTQPPSASGTPGQRVTISCSGSSSNIGSSSVSWYQQLPG |
| | 107388 | WVRQAPGKGLEWVGRIKSVTDGETTDYAAPVKGRF | TAPKLLIYKNNQRPSGVPDRFSGSKSGTSASLAISGLRSEDE |
| | | TISRDDSKSTLYLQMNSLKTEDTAVYYCTSSFCCR | ADYYCSTWDDSLSVRVFGGGTKLTVL (SEQ ID NO: |
| | | GGSCPSHDTSYCGGGQYKSYYYMDVWGKGTTVTVS | 123) |
| | | S (SEQ ID NO: 1753) | |
| 8 | AIP- | EVQLVESGGALVKPGGSLRLSCAASGFTFSKAWMS | QSVLTQPPSASGTPGQRVTISCSGSSSNIGSSSVSWYQQLPG |
| | 191692 | WVRQAPGKGLEWVGRIKSVTDGETTDYAAPVKGRF | TAPKLLIYKNNQRPSGVPDRFSGSKSGTSASLAISGLRSEDE |
| | | TISRDDSKSTLYLQMNSLKTEDTAVYYCTSSFCCR | ADYYCSTWDDSLSVRVFGGGTKLTVL (SEQ ID NO: |
| | | GGSCPSHDTSYCGGGSGYKSYYYMDVWGKGTTVTV | 123) |
| | | SS (SEQ ID NO: 1754) | |
| 9 | AIP- | EVQLVESGGALVKPGGSLRLSCAASGFTFSKAWMS | QSVLTQPPSASGTPGQRVTISCSGSSSNIGSSSVSWYQQLPG |
| | 163723 | WVRQAPGKGLEWVGRIKSVTDGETTDYAAPVKGRF | TAPKLLIYKNNQRPSGVPDRFSGSKSGTSASLAISGLRSEDE |
| | | TISRDDSKSTLYLQMNSLKTEDTAVYYCTSSFCCR | ADYYCSTWDDSLSVRVFGGGTKLTVL (SEQ ID NO: |
| | | GGSCPSHDTSYCGGOKSYYYMDVWGKGTTVTVSS | 123) |
| | | (SEQ ID NO: 1755) | |
| 10 | AIP- | EVQLVESGGALVKPGGSLRLSCAASGFTFSKAWMS | QSVLTQPPSASGTPGQRVTISCSGSSSNIGSSSVSWYQQLPG |
| | 167295 | WVRQAPGKGLEWVGRIKSVTDGETTDYAAPVKGRF | TAPKLLIYKNNQRPSGVPDRFSGSKSGTSASLAISGLRSEDE |
| | | TISRDDSKSTLYLQMNSLKTEDTAVYYCTSSFCCR | ADYYCSTWDDSLSVRVFGGGTKLTVL (SEQ ID NO: |
| | | GGSCPSHDTSYCGGQYSYYYMDVWGKGTTVTVSS | 123) |
| | | (SEQ ID NO: 1756) | |
| 11 | AIP- | EVQLVESGGALVKPGGSLRLSCAASGFTFSKAWMS | QSVLTQPPSASGTPGQRVTISCSGSSSNIGSSSVSWYQQLPG |
| | 125646 | WVRQAPGKGLEWVGRIKSVTDGETTDYAAPVKGRF | TAPKLLIYKNNQRPSGVPDRFSGSKSGTSASLAISGLRSEDE |
| | | TISRDDSKSTLYLOMNSLKTEDTAVYYCTSSFCCR | ADYYCSTWDDSLSVRVFGGGTKLTVL (SEQ ID NO: |
| | | GGSCPSHDTSYCGQYKSYYYMDVWGKGTTVTVSS | 123) |
| | | (SEQ ID NO: 1746) | |
| | AIP- | EVQLVESGGALVKPGGSLRLSCAASGFTFSKAWMS | QSVLTQPPSASGTPGQRVTISCSGSSSNIGSSSVSWYQQLPG |
| | 114111 | WVRQAPGKGLEWVGRIKSVTDGETTDYAAPVKGRF | TAPKLLIYKNNQRPSGVPDRFSGSKSGTSASLAISGLRSEDE |
| | | TISRDDSKSTLYLQMNSLKTEDTAVYYCTSSFCCR | ADYYCSTWDDSLSVRVFGGGTKLTVL (SEQ ID NO: |
| | | GGSCPSHDTSYCGGQYKSSYYYMDVWGKGTTVTVS | 123) |
| | | S (SEQ ID NO: 1757) | |

TABLE 3B

| AIP | | | | | | |
|---|---|---|---|---|---|---|
| Number | HCDR1 | HCDR2 | HCDR3 | LCDR1 | LCDR2 | LCDR3 |
| AIP- | GFTFSKAWMS | RIKSVTDGETTDYA | TSSFCGGPSHDTSYC | SGSSSNIGSSSV | KNNQRPS | STWDDSLSVRV |
| 131762 | (SEQ ID NO: | APVKG (SEQ ID | GGQYKSYYYMDV | S (SEQ ID | (SEQ ID NO: | (SEQ ID NO: |
| | 1) | NO: 9) | (SEQ ID NO: | NO: 48) | 59) | 68) |
| | | | 1734) | | | |
| AIP- | GFTFSKAWMS | RIKSVTDGETTDYA | TSSFCCRSGGSCPSH | SGSSSNIGSSSV | KNNQRPS | STWDDSLSVRV |
| 194564 | (SEQ ID NO: | APVKG (SEQ ID | DTSYCGGQYKSYYYM | S (SEQ ID | (SEQ ID NO: | (SEQ ID NO: |
| | 1) | NO: 9) | DV (SEQ ID NO: | NO: 48) | 59) | 68) |
| | | | 1735) | | | |
| AIP- | GFTFSKAWMS | RIKSVTDGETTDYA | TSSFCCRGGGSCPSH | SGSSSNIGSSSV | KNNQRPS | STWDDSLSVRV |
| 169752 | (SEQ ID NO: | APVKG (SEQ ID | DTSYCGGQYKSYYYM | S (SEQ ID | (SEQ ID NO: | (SEQ ID NO: |
| | 1) | NO: 9) | DV (SEQ ID NO: | NO: 48) | 59) | 68) |
| | | | 1730) | | | |
| AIP- | GFTFSKAWMS | RIKSVTDGETTDYA | TSSFCCRGGGGSCPS | SGSSSNIGSSSV | KNNQRPS | STWDDSLSVRV |
| 185680 | (SEQ ID NO: | APVKG (SEQ ID | HDTSYCGGQYKSYYY | S (SEQ ID | (SEQ ID NO: | (SEQ ID NO: |
| | 1) | NO: 9) | MDV (SEQ ID NO: | NO: 48) | 59) | 68) |
| | | | 1737) | | | |
| AIP- | GFTFSKAWMS | RIKSVTDGETTDYA | TSSFCCRGGSGGSCP | SGSSSNIGSSSV | KNNQRPS | STWDDSLSVRV |
| 145328 | (SEQ ID NO: | APVKG (SEQ ID | SHDTSYCGGQYKSYY | S (SEQ ID | (SEQ ID NO: | (SEQ ID NO: |
| | 1) | NO: 9) | YMDV (SEQ ID | NO: 48) | 59) | 68) |
| | | | NO: 1738) | | | |
| AIP- | GFTFSKAWMS | RIKSVTDGETTDYA | TSSFSCRGGSCPSHD | SGSSSNIGSSSV | KNNQRPS | STWDDSLSVRV |
| 182606 | (SEQ ID NO: | APVKG (SEQ ID | TSYGGQYKSYYYMDV | S (SEQ ID | (SEQ ID NO: | (SEQ ID NO: |
| | 1) | NO: 9) | (SEQ ID NO: | NO: 48) | 59) | 68) |
| | | | 1739) | | | |
| AIP- | GFTFSKAWMS | RIKSVTDGETTDYA | TSSFCCRGGSCPSHD | SGSSSNIGSSSV | KNNQRPS | STWDDSLSVRV |
| 107388 | (SEQ ID NO: | APVKG (SEQ ID | TSYCGGGQYKSYYYM | S (SEQ ID | (SEQ ID NO: | (SEQ ID NO: |
| | 1) | NO: 9) | DV (SEQ ID NO: | NO: 48) | 59) | 68) |
| | | | 1740) | | | |
| AIP- | GFTFSKAWMS | RIKSVTDGETTDYA | TSSFCCRGGSCPSHD | SGSSSNIGSSSV | KNNQRPS | STWDDSLSVRV |
| 191692 | (SEQ ID NO: | APVKG (SEQ ID | TSYCGGGSGYKSYYY | S (SEQ ID | (SEQ ID NO: | (SEQ ID NO: |
| | 1) | NO: 9) | MDV (SEQ ID NO: | NO: 48) | 59) | 68 |
| | | | 1741) | | | |
| AIP- | GFTFSKAWMS | RIKSVTDGETTDYA | TSSFCCRGGSCPSHD | SGSSSNIGSSSV | KNNQRPS | STWDDSLSVRV |
| 163723 | (SEQ ID NO: | APVKG (SEQ ID | TSYCGGQKSYYYMDV | S (SEQ ID | (SEQ ID NO: | (SEQ ID NO: |
| | 1) | NO: 9) | (SEQ ID NO: | NO: 48) | 59) | 68) |
| | | | 1742) | | | |
| AIP- | GFTFSKAWMS | RIKSVTDGETTDYA | TSSFCCRGGSCPSHD | SGSSSNIGSSSV | KNNQRPS | STWDDSLSVRV |
| 167295 | (SEQ ID NO: | APVKG (SEQ ID | TSYCGGQYSYYYMDV | S (SEQ ID | (SEQ ID NO: | (SEQ ID NO: |
| | 1) | NO: 9) | (SEQ ID NO: | NO: 48) | 59) | 68 |
| | | | 1743) | | | |
| AIP- | GFTFSKAWMS | RIKSVTDGETTDYA | TSSFCCRGGSCPSHD | SGSSSNIGSSSV | KNNQRPS | STWDDSLSVRV |
| 125646 | (SEQ ID NO: | APVKG (SEQ ID | TSYCGQYKSYYYMDV | S (SEQ ID | (SEQ ID NO: | (SEQ ID NO: |
| | 1) | NO: 9) | (SEQ ID NO: | NO: 48) | 59) | 68) |
| | | | 1744) | | | |
| AIP- | GFTFSKAWMS | RIKSVTDGETTDYA | TSSFCCRGGSCPSHD | SGSSSNIGSSSV | KNNQRPS | STWDDSLSVRV |
| 114111 | (SEQ ID NO: | APVKG (SEQ ID | TSYCGGQYKSSYYYM | S (SEQ ID | (SEQ ID NO: | (SEQ ID NO: |
| | 1) | NO: 9) | DV (SEQ ID NO: | NO: 48) | 59) | 68) |
| | | | 1745) | | | |

### Exemplar Expressed Scaffold Sequences

TABLE 4A

| | AIP | | |
|---|---|---|---|
| | Number | V_{H} Sequence | V_{L} Sequence |
| 1 | AIP- | EVQLVESGGALVKPGGSLRLSCAASGFTFSKAWMT | QSVLTQAPSASETPGQRVIISCSGSSSNIGSSSVSWYQQLPG |
| | 192482 | WVRQAPGKGLEWVGRIKSVTDGETTDYAAPVKGRF | TAPKLLIYKNNQRPSGVPDRFSGSKSGTSASLAISGLRSEDE |
| | | TISRDDSKSVLYLQMSSLKTEDTAVYFCTSSFCCR | ADYYCSTWDDSLSVRVFGGGTKLTVL (SEQ ID NO: |
| | | GGSCPSHDTSFCGGODKRYYYMDVWGKGTTVTVSS | 141) |
| | | (SEQ ID NO: 95) | |
| 2 | AIP- | EVQLVESGGGLVKPGGSLRLSCAGSGFTFNKAWMS | QQSVLTQPPSASGTPGQTVTISCSGSSSHIESNYVEWYQQLP |
| | 186044 | WVRQAPGKGLEWVGRIKSTSDGGITDYAAPVKGRF | ETAPKLLIHRNDQRPSGVPDRFSGSKSGTSASLAISGLRSED |
| | | TISRDDSKDTLYLQMNSLKTEDAAVYYCTTSFCCR | DADYYCAAWDDSLSVWVFGGGTKLTVL (SEQ ID NO: |
| | | GGRCPSRDTSFCGGQYNSYYYMDVWGRGTTVTVSS | 1759) |
| | | (SEQ ID NO: 1758) | |
| 3 | AIP- | EVQLVESGGALVKPGGSLRLSCAASGFTFSKAWMT | QSVLTQPPSASGTPGQRVTISCSGSSSNIGSSSVSWYQQLPG |
| | 122563 | WVRQAPGKGLEWVGRIKSVTDGETTDYAAPVKGRF | TAPKLLIYKNNQRPSGVPDRFSGSKSGTSASLAISGLRSEDE |
| | | TISRDDSKSTLYLQMNSLKTEDTAVYYCTSSFCCR | ADYYCSTWDDSLSVRVFGGGTKLTVL (SEQ ID NO: |
| | | GGSCPSHDTSFCGGQDKRYYYMDVWGKGTTVTVSS | 123) |
| | | (SEQ ID NO: 100) | |
| 4 | AIP- | EVQLVESGGALVKPGGSLRLSCAASGFTFSKAWMS | QSVLTQPPSASGTPGQRVTISCSGSSSNIGSSSVSWYQQLPG |
| | 160470 | WVRQAPGKGLEWVGRIKSVTDGETTDYAAPVKGRF | TAPKLLIYKNNQRPSGVPDRFSGSKSGTSASLAISGLRSEDE |
| | | TISRDDSKSTLYLQMNSLKTEDTAVYYCTSSFCCR | ADYYCSTWDDSLSVRVFGGGTKLTVL (SEQ ID NO: |
| | | GGSCPSHDTSYCGGQYKSYYYMDVWGKGTTVTVSS | 123) |
| | | (SEQ ID NO: 94) | |
| 5 | AIP - | EVQLVESGGALVKPGGSLRLSCAASGFDASKAWFT | QSVLTQPPSASGTPGQRVTISCSGSSSNIGSSSVSWYQQLPG |
| | 145518 | WVRQAPGKGLEWVGRIKSVTDGETTDYAAPVKGRF | TAPKLLIYKNNQRPSGVPDRFSGSKSGTSASLAISGLRSEDE |
| | | TISRDDSKSTLYLQMNSLKTEDTAVYYCTSSFCCR | ADYYCSTWDDSLSVRVFGGGTKLTVL (SEQ ID NO: |
| | | GGSCPSHDTSYCGGQYKSYYYMDVWGKGTTVTVSS | 123) |
| | | (SEQ ID NO: 1421) | |
| 6 | AIP - | EVQLVESGGALVKPGGSLRLSCAASGFTFSKAWMS | QSVLTQPPSASGTPGQRVTISCSGSSSNIGSSSVSWYQQLPG |
| | 167533 | WVRQAPGKGLEWVGRIKAADDGKQTDYAAPVKGRF | TAPKLLIYKNNQRPSGVPDRFSGSKSGTSASLAISGLRSEDE |
| | | TISRDDSKSTLYLQMNSLKTEDTAVYYCTSSFCCR | ADYYCSTWDDSLSVRVFGGGTKLTVL (SEQ ID NO: |
| | | GGSCPSHDTSYCGGQYKSYYYMDVWGKGTTVTVSS | 123) |
| | | (SEQ ID NO: 120) | |
| 7 | AIP- | EVQLVESGGALVKPGGSLRLSCAASGFTFSKAWMS | QSVLTQPPSASGTPGQRVTISCSGSSSNIGSSSVSWYQQLPG |
| | 112580 | WVRQAPGKGLEWVGRIKSVTDGETTDYAAPVKGRF | TAPKLLIYKNNQRPSGVPDRFSGSKSGTSASLAISGLRSEDE |
| | | TISRDDSKSTLYLOMNSLKTEDTAVYYCISSFCCR | ADYYCSTWDDSLSVRVFGGGTKLTVL (SEQ ID NO: |
| | | GNSCPSSDTSYCNGQYKSYYYMDVWGKGTTVTVSS | 123) |
| | | (SEQ ID NO: 121) | |
| 8 | AIP - | EVQLVESGGALVKPGGSLRLSCAASGFTFSKAWMS | QSVLTQPPSASGTPGQRVTISCHGSESDIGSHDVLWYQQLPG |
| | 150277 | WVRQAPGKGLEWVGRIKSVTDGETTDYAAPVKGRF | TAPKLLIYKNNQRPSGVPDRFSGSKSGTSASLAISGLRSEDE |
| | | TISRDDSKSTLYLQMNSLKTEDTAVYYCTSSFCCR | ADYYCSTWDDSLSVRVFGGGTKLTVL (SEQ ID NO: |
| | | GGSCPSHDTSYCGGQYKSYYYMDVWGKGTTVTVSS | 1666) |
| | | (SEQ ID NO: 94) | |
| 9 | AIP- | EVQLVESGGALVKPGGSLRLSCAASGFTFSKAWMS | QSVLTQPPSASGTPGQRVTISCSGSSSNIGSSSVSWYQQLPG |
| | 136060 | WVRQAPGKGLEWVGRIKSVTDGETTDYAAPVKGRF | TAPKLLIYKNSLRPQGVPDRFSGSKSGTSASLAISGLRSEDE |
| | | TISRDDSKSTLYLQMNSLKTEDTAVYYCTSSFCCR | ADYYCSTWDDSLSVRVFGGGTKLTVL (SEQ ID NO: |
| | | GGSCPSHDTSYCGGQYKSYYYMDVWGKGTTVTVSS | 168) |
| | | (SEQ ID NO: 94) | |
| 10 | 154708 | EVQLVESGGALVKPGGSLRLSCAASGFTFSKAWMS | QSVLTQPPSASGTPGQRVTISCSGSSSNIGSSSVSWYQQLPG |
| | AIP- | WVRQAPGKGLEWVGRIKSVTDGETTDYAAPVKGRF | TAPKLLIYKNNQRPSGVPDRFSGSKSGTSASLAISGLRSEDE |
| | | TISRDDSKSTLYLQMNSLKTEDTAVYYCTSSFCCR | ADYYCATIDESMKIKVFGGGTKLTVL (SEQ ID NO: |
| | | GGSCPSHDTSYCGGQYKSYYYMDVWGKGTTVTVSS | 1760) |
| | | (SEQ ID NO: 94) | |

TABLE 4B

| AIP | | | | | | |
|---|---|---|---|---|---|---|
| Number | HCDR1 | HCDR2 | HCDR3 | LCDR1 | LCDR2 | LCDR3 |
| AIP- | GFTFSKAWMT | RIKSVTDGETTDYA | TSSFCCRGGSCPSHD | SGSSSNIGSSSV | KNNQRPS | STWDDSLSVRV |
| 192482 | (SEQ ID NO: | APVKG (SEQ ID | TSFCGGODKRYYYMD | S (SEQ ID | (SEQ ID NO: | (SEQ ID NO: |
| | 8) | NO: 9) | V (SEQ ID NO: | NO: 48) | 59) | 68) |
| | | | 34) | | | |
| AIP - | GFTFNKAWMS | RIKSTSDGGITDYA | TTSFCCRGGRCPSRD | SGSSSHIESNYV | RNDQRPS | AAWDDSLSVWV |
| 186044 | (SEQ ID NO: | APVKG (SEQ ID | TSFCGGQYNSYYYMD | E (SEQ ID | (SEQ ID NO: | (SEQ ID NO: |
| | 1761) | NO: 16) | V (SEQ ID NO: | NO: 1762) | 1763) | 1764) |
| | | | 38 | | | |
| AIP- | GFTFSKAWMT | RIKSVTDGETTDYA | TSSFCCRGGSCPSHD | SGSSSNIGSSSV | KNNQRPS | STWDDSLSVRV |
| 122563 | (SEQ ID NO: | APVKG (SEQ ID | TSFCGGQDKRYYYMD | S (SEQ ID | (SEQ ID NO: | (SEQ ID NO: |
| | 8) | NO: 9) | V (SEQ ID NO: | NO: 48) | 59) | 68) |
| | | | 34) | | | |
| AIP - | GFTFSKAWMS | RIKSVTDGETTDYA | TSSFCCRGGSCPSHD | SGSSSNIGSSSV | KNNQRPS | STWDDSLSVRV |
| 160470 | (SEQ ID NO: | APVKG (SEQ ID | TSYCGGQYKSYYYMD | S (SEQ ID | (SEQ ID NO: | (SEQ ID NO: |
| | 1) | NO: 9) | V (SEQ ID NO: | NO: 48) | 59) | 68) |
| | | | 21) | | | |
| AIP - | GFDASKAWFT | RIKSVTDGETTDYA | TSSFCCRGGSCPSHD | SGSSSNIGSSSV | KNNQRPS | STWDDSLSVRV |
| 145518 | (SEQ ID NO: | APVKG (SEQ ID | TSYCGGQYKSYYYMD | S (SEQ ID | (SEQ ID NO: | (SEQ ID NO: |
| | 257) | NO: 9) | V (SEQ ID NO: | NO: 48) | 59) | 68) |
| | | | 21) | | | |
| AIP- | GFTFSKAWMS | RIKAADDGKQTDYA | TSSFCCRGGSCPSHD | SGSSSNIGSSSV | KNNQRPS | STWDDSLSVRV |
| 167533 | (SEQ ID NO: | APVKG (SEQ ID | TSYCGGQYKSYYYMD | S (SEQ ID | (SEQ ID NO: | (SEQ ID NO: |
| | 1) | NO: 19) | V (SEQ ID NO: | NO: 48) | 59) | 68) |
| | | | 21) | | | |
| AIP - | GFTFSKAWMS | RIKSVTDGETTDYA | ISSFCCRGNSCPSSD | SGSSSNIGSSSV | KNNQRPS | STWDDSLSVRV |
| 112580 | (SEQ ID NO: | APVKG (SEQ ID | TSYCNGQYKSYYYMD | S (SEQ ID | (SEQ ID NO: | (SEQ ID NO: |
| | 1) | NO: 9) | V (SEQ ID NO: | NO: 48) | 59) | 68) |
| | | | 27) | | | |
| AIP- | GFTFSKAWMS | RIKSVTDGETTDYA | TSSFCCRGGSCPSHD | HGSESDIGSHDV | KNNQRPS | STWDDSLSVRV |
| 150277 | (SEQ ID NO: | APVKG (SEQ ID | TSYCGGQYKSYYYMD | L (SEQ ID | (SEQ ID NO: | (SEQ ID NO: |
| | 1) | NO: 9) | V (SEQ ID NO: | NO: 890) | 59) | 68) |
| | | | 21) | | | |
| AIP - | GFTFSKAWMS | RIKSVTDGETTDYA | TSSFCCRGGSCPSHD | SGSSSNIGSSSV | KNSLRPQ | STWDDSLSVRV |
| 136060 | (SEQ ID NO: | APVKG (SEQ ID | TSYCGGQYKSYYYMD | S (SEQ ID | (SEQ ID NO: | (SEQ ID NO: |
| | 1) | NO: 9) | V (SEQ ID NO: | NO: 48) | 67) | 68) |
| | | | 21) | | | |
| AIP- | GFTFSKAWMS | RIKSVTDGETTDYA | TSSFCCRGGSCPSHD | SGSSSNIGSSSV | KNNQRPS | ATIDESMKIKV |
| 154708 | (SEQ ID NO: | APVKG (SEQ ID | TSYCGGQYKSYYYMD | S (SEQ ID | (SEQ ID NO: | (SEQ ID NO: |
| | 1) | NO: 9) | V (SEQ ID NO: | NO: 48) | 59) | 1765) |
| | | | 21) | | | |

1. An antibody that binds an RNA-protein complex, wherein the antibody comprises a heavy chain variable region comprising a HCDR1, a HCDR2, and a HCDR3, and a light chain variable region comprising a LCDR1, a LCDR2, and a LCDR3,
wherein the antibody comprises a pocket that is 13-20 A deep,
and the HCDR3 comprises
i. at least 25 amino acids
ii. a first intra-HCDR3 disulfide bond, and
iii. optionally, a second intra-HCDR3 disulfide bond.

2. The antibody of claim 1, wherein the HCDR3 comprises:
amino acid sequence X¹CCX²CX³CX⁴, wherein X¹=4 amino acid residues, X²=4-7 amino acid residues, X³=6-8 amino acid residues, and X⁴=10⁻¹⁴ amino acid residues,
amino acid sequence X¹CGGX²CX³ wherein X¹=4 amino acid residues, X²=7 amino acid residues, and X³=12 amino acid residues (SEQ ID NO: 1732);
amino acid sequence of X¹SCX²CX³ wherein X¹=4 amino acid residues, X²=4 amino acid residues, and X³=19 amino acid residues:
amino acid sequence X¹CCX²CX³CX⁴, wherein X¹=4 amino acid residues, X²=4 amino acid residues, X³=7 amino acid residues, and X⁴=12 amino acid residues (SEQ ID NO: 1731) or
(I/T)(S/T)X₃(F/Y)CCX₇(G/S)X₉X₁₀CX₁₂(N/S)X₁₄(D/E)TS(F/Y)CX₂₀(G/N)X₂₂X₂₃ X₂₄,X₂₅ (F/Y)YX₂₈X₂₉(D/N)X₃₁, wherein X₃ is A, P, or S; X₇ is H, L, Q, or R: X₉ is A, G, K, or N; X₁₀ is A, N, Q, R, or S; X₁₂ is A, L, or P; X₁₄ is H, Q, R, or S; X₂₀ is A, G, or N: X₂₂ is Q, S, or Y; X₂₃ is D, F, N, or Y; X₂₄ is A, K, N, P, or Q; X₂₅ is D, Q, R, or S: X₂₈ is F, L, W, or Y; X₂₉ is F, M, or V; and X₃₁ is I, P, or V (SEQ ID NO: 1729); or
(I/T)(S/T)X₃(F/Y)X₅CX₇(G/S)X₉X₁₀CX₁₂X₁₃X₁₄(D/E)X₁₆SX₁₈X₁₉X₂₀X₂₁X₂₂X₂₃X₂₄X₂₅(F/Y)(F/Y)X₂₈X₂₉(D/N)X₃₁, wherein X₃ is A, P, S, or T; X₅ is A, C, or S: X₇ is H, L, Q, or R; X₉ is A, G, K, or N; X₁₀ is A, N, Q, R, or S; X₁₂ is A, L, or P: X₁₃ is A, N, or S: X₁₄ is H, Q, R, or S: X₁₆ is N, Q, or T: X₁₈ is F, M, or Y; X₁₉ is C, S, or V; X₂₀ is A, G, or N; X₂₁ is A, G, or N; X₂₂ is Q, S, or Y: X₂₃ is D, F, N, S, or Y; X₂₄ is A, K, N, P, Q, or S; X₂₅ is D, K, Q, R, or S;
X₂₈ is F, L, W, or Y: X₂₉ is F, M, or V; and X₃₁ is I, P, or V.

3-7. (canceled)

8. The antibody of claim 1, wherein the HCDR3 comprises the amino acid sequence of TSSFCCRGGSCPSHDTSYCGGQYKSYYYMDV (SEQ ID NO: 21) comprises at least 1, 2, 3, 4, 5, 6, 7, 8, 9, or 10 amino acid substitutions at positions that maintain the first disulfide bond and, optionally the second disfulfide bond.

9. The antibody of claim 1, wherein the pocket comprises amino acid residues 36, 37, 38, 39, 40, 52, 55, 58, 60, 61, 105, 106, 107, 108, 109, 111.5, 111.7, 111.8, 111.9, and 114 in the V_{H} per IMGT numbering and amino acid residues 37, 38, 40, 42, 55, 56, 107, and 116 in the V_{L} per IMGT numbering.

10. The antibody of claim 9, wherein the pocket further comprises:
one or more amino acid residues selected from the group consisting of 57, 111.6, 112.9, 112.7 and 116 in the V_{H} per IMGT numbering; or all of amino acid residues 57, 111.6, 112.9, 112.7 and 116 in the V_{H} per IMGT numbering; and/or
one or more amino acid residues selected from the group consisting of 39, 52, 57, 80, 105, and 106 in the V_{L} per IMGT numbering: or all of amino acid residues 39, 52, 57, 80, 105, and 106 in the V_{L} per IMGT numbering;

11.-13. (canceled)

14. The antibody of claim 9, wherein the pocket comprises
at least 1, 2, 3, 4, 5, 6, 7, 8, 9, 10, 11, 12, 13, 14, 15, 16, 17, 18, 19 or 20 of the following residues in the V_{H}: A, C, H, K, M, N or R at position 36; A or V at position 37, F, H, V, W, or Y at position 38; F, M or Y at position 39; S, T, or Y at position 40, W at position 52; F or R at position 55, A or S at position 58; D, H, Q, S, or T at position 60; D, E, N, or S at position 61; I, T, or V at position 105; F, S or T at position 106; A, P, S, or T at position 107; F or Y at position 108; A, C, or S at position 109; A, C, L or P at position 111.5; H, Q, R, or S at position 111.7; D or E at position 111.8; C, N, Q, or T at position 111.9; or C, F, L, W, or Y at position 114; and/or
at least 1, 2, 3, 4, 5, 6, 7, or 8 of the following residues in the V_{L}: A, H, N, S, or T at position 37; A, D, F, S, T, or Y at position 38; A, D, E, L, S, T, or Y at position 40; Y at position 42; H or Y at position 55; A, H, K, M, N, or R at position 56; F, I or W at position 107; or H, K, Q, R, V, or W at position 116.

15. The antibody of claim 14, further comprising
at least 1, 2, 3, 4, or 5 of the following residues in the V_{H} per IMGT numbering: K or Q at position 57; A, C, D, N, or S at position 111.6; S at position 112.9; A, C, S, or V at position 112.7; or D or N at position 116; and/or
at least 1, 2, 3, 4, 5, or 6 following residues in the V_{L} per IMGT numbering: T or V at position 39; L at position 52; D or N at position 57; K at position 80; A or S at position 105; or A, I, S, or T at position 106; or
the pocket comprises:
at least 1, 2, 3, 4, 5, 6, 7, 8, 9, 10, 11, 12, 13, 14, 15, 16, 17, 18, 19 or 20 of the following residues in the V_{H}: K at position 36: A at position 37: W at position 38: F or M at position 39: S or T at position 40: W at position 52: R at position 55: A or S at position 58; D, S, or T at position 60: D at position 61: I or T at position 105: S or T at position 106: S at position 107: F at position 108: C at position 109: P at position 111.5: H, R, or S at position 111.7: D at position 111.8: T at position 111.9: or Y at position 114; and/or
at least 1, 2, 3, 4, 5, 6, 7, or 8 of the following residues in the V_{L}: H, N, or S at position 37: D, S or Y at position 38: E, L, or S at position 40: Y at position 42: H or Y at position 55: K or R at position 56: I or W at position 107: or K, R, or W at position 116.

16. (canceled)

17. The antibody of claim 15, further comprising
at least 1, 2, 3, 4, or 5 of the following residues in the V_{H} per IMGT numbering: K at position 57; S at position 111.6; S at position 112.9; C at position 112.7; or D at position 116; and/or
at least 1, 2, 3, 4, 5, or 6 following residues in the V_{L} per IMGT numbering: V at position 39; L at position 52; N at position 57; K at position 80; A or S at position 105; or A or T at position 106.

18. A method of generating an antibody that binds to an RNA-protein complex comprising mutating a scaffold antibody that binds to a first RNA-protein complex to generate an antibody that binds to a second RNA-protein complex and has an antigen binding specificity that differs from the antigen binding specificity of the scaffold antibody, wherein the scaffold antibody comprises a heavy chain variable region comprising a HCDR1, a HCDR2, and a HCDR3, and a light chain variable region comprising a LCDR1, a LCDR2, and a LCDR3, and comprises a pocket that is 13-20 Å deep, and the HCDR3 comprises
i. at least 25 amino acids
ii. a first intra-HCDR3 disulfide bond, and
iii. optionally, a second intra-HCDR3 disulfide bond.

19. The method of claim 18, wherein the HCDR3 comprises:
the amino acid sequence of X¹CCX²CX³CX⁴, wherein X¹=4 amino acid residues, X₂₌₄-7 amino acid residues, X³=6-8 amino acid residues, and X⁴=10-14 amino acid residues (SEQ ID NO: 1728); or
the amino acid sequence of (I/T)(S/T)X₃(F/Y)CCX₇(G/S)X₉X₁₀CX₁₂(N/S)X₁₄(D/E)TS(F/Y)CX₂₀(G/N)X₂₂X₂₃X₂₄,X₂₅ (F/Y)YX₂₈X₂₉(D/N)X₃₁, wherein X₃ is A, P, or S; X₇ is H, L, Q, or R; X₉ is A, G, K, or N: X₁₀ is A, N, Q, R, or S; X₁₂ is A, L, or P: X₁₄ is H, Q, R, or S; X₂₀ is A, G, or N; X₂₂ is Q, S, or Y: X₂₃ is D, F, N, or Y; X₂₄ is A, K, N, P, or Q; X₂₅ is D, Q, R, or S; X₂₈ is F, L, W, or Y: X₂₉ is F, M, or V; and X₃₁ is I, P, or V (SEQ ID NO: 1729); or
the amino acid sequence of X¹CCX²CX³ C X⁴, wherein X¹=4 amino acid residues, X²=4 amino acid residues, X³=7 amino acid residues, and X⁴=12 amino acid residues (SEQ ID NO: 1731): or
the amino acid sequence of X¹CGGX²CX³ wherein X¹=4 amino acid residues, X²=7 amino acid residues, and X³=12 amino acid residues (SEQ ID NO: 1732); or
the amino acid sequence of (I/T)(S/T)X₃(F/Y)X₅CX₇(G/S)X₉X₁₀CX₁₂X₁₃X₁₄(D/E)X₁₆SX₁₈X₁₉X₂₀X₂₁X₂₂X₂₃X₂₄X₂₅(F/Y)(F/Y)X₂₈X₂₉(D/N)X₃₁, wherein X₃ is A, P, S, or T; X₅ is A, C, or S; X₇ is H, L, Q, or R; X₉ is A, G, K, or N; X₁₀ is A, N, Q, R, or S: X₁₂ is A, L, or P: X₁₃ is A, N, or S: X₁₄ is H, Q, R, or S: X₁₆ is N, Q, or T; X₁₈ is F, M, or Y: X₁₉ is C, S, or V: X₂₀ is A, G, or N: X₂₁ is A, G, or N: X₂₂ is Q, S, or Y: X₂₃ is D, F, N, S, or Y: X₂₄ is A, K, N, P, Q, or S; X₂₅ is D, K, Q, R, or S: X₂₈ is F, L, W, or Y: X₂₉ is F, M, or V; and X₃₁ is I, P, or V: or
the amino acid sequence of X¹SCX²CX³ wherein X¹=4 amino acid residues, X²=4 amino acid residues, and X³=19 amino acid residues: or
the amino acid sequence of TSSFCCRGGSCPSHDTSYCGGQYKSYYYMDV (SEQ ID NO: 21) comprises at least 1, 2, 3, 4, 5, 6, 7, 8, 9, or 10 amino acid substitutions at positions that maintain the first disulfide bond and, optionally the second disfulfide bond.

20.-25. (canceled)

26. The method of claim 18, wherein the pocket comprises amino acid residues 36, 37, 38, 39, 40, 52, 55, 58, 60, 61, 105, 106, 107, 108, 109, 111.5, 111.7, 111.8, 111.9, and 114 in the V_{H} per IMGT numbering and amino acid residues 37, 38, 40, 42, 55, 56, 107, and 116 in the V_{L} per IMGT numbering, optionally wherein
the pocket further comprises one or more amino acid residues selected from the group consisting of 57, 111.6, 112.9, 112.7 and 116 in the V_{H} per IMGT numbering, or all of the amino acid residues 57, 111.6, 112.9, 112.7 and 116 in the V_{H} per IMGT numbering; and/or
the pocket further comprises one or more amino acid residues selected from the group consisting of 39, 52, 57, 80, 105, and 106 in the V_{L} per IMGT numbering: or all of the amino acid residues 9, 52, 57, 80, 105, and 106 in the V_{L} per IMGT numbering.

27.-30. (canceled)

31. The method of claim 26, wherein the pocket comprises
at least 1, 2, 3, 4, 5, 6, 7, 8, 9, 10, 11, 12, 13, 14, 15, 16, 17, 18, 19 or 20 of the following residues in the V_{H}: A, C, H, K, M, N or R at position 36; A or V at position 37, F, H, V, W, or Y at position 38; F, M or Y at position 39; S, T, or Y at position 40, W at position 52; F or R at position 55, A or S at position 58; D, H, Q, S, or T at position 60; D, E, N, or S at position 61; I, T, or V at position 105; F, S or T at position 106; A, P, S, or T at position 107; F or Y at position 108; A, C, or S at position 109; A, C, L or P at position 111.5; H, Q, R, or S at position 111.7; D or E at position 111.8; C, N, Q, or T at position 111.9; or C, F, L, W, or Y at position 114; and/or
at least 1, 2, 3, 4, 5, 6, 7, or 8 of the following residues in the V_{L}: A, H, N, S, or T at position 37; A, D, F, S, T, or Y at position 38; A, D, E, L, S, T, or Y at position 40; Y at position 42; H or Y at position 55; A, H, K, M, N, or R at position 56; F, I or W at position 107;
or H, K, Q, R, V, or W at position 116.

32. The method of claim 31, further comprising
(a) at least 1, 2, 3, 4, or 5 of the following residues in the V_{H} per IMGT numbering: K or Q at position 57; A, C, D, N, or S at position 111.6; S at position 112.9; A, C, S, or V at position 112.7; or D or N at position 116; and/or
at least 1, 2, 3, 4, 5, or 6 following residues in the V_{L} per IMGT numbering: T or V at position 39; L at position 52; D or N at position 57; K at position 80; A or S at position 105; or A, I, S, or T at position 106; or
(b) at least 1, 2, 3, 4, 5, 6, 7, 8, 9, 10, 11, 12, 13, 14, 15, 16, 17, 18, 19 or 20 of the following residues in the V_{H}: K at position 36: A at position 37: W at position 38: F or M at position 39: S or T at position 40: W at position 52: R at position 55: A or S at position 58; D, S, or T at position 60: D at position 61: I or T at position 105: S or T at position 106: S at position 107: F at position 108: C at position 109: P at position 111.5: H, R, or S at position 111.7: D at position 111.8: T at position 111.9: or Y at position 114; and/or
at least 1, 2, 3, 4, 5, 6, 7, or 8 of the following residues in the V_{L}: H, N, or S at position 37: D, S or Y at position 38: E, L, or S at position 40: Y at position 42: H or Y at position 55: K or R at position 56: I or W at position 107: or K, R, or W at position 116.

33. (canceled)

34. The method of claim 33, wherein (b) further comprises
at least 1, 2, 3, 4, or 5 of the following residues in the V_{H} per IMGT numbering: K at position 57; S at position 111.6; S at position 112.9; C at position 112.7; or D at position 116;
and/or at least 1, 2, 3, 4, 5, or 6 following residues in the V_{L} per IMGT numbering: V at position 39; L at position 52; N at position 57; K at position 80; A or S at position 105; or A or T at position 106.

35. The method of claim 18, wherein the scaffold antibody comprises an HCDR3 as set forth in Table 1B, Table 2B, or Table 3B: or comprises the six CDRS of an antibody as set forth in Table 1B, Table 2B, or Table 3B.

36. (canceled)

37. The method of claim 18, wherein the method comprises generating a plurality of mutated scaffold antibodies;
screening the mutated scaffold antibodies for binding to the second RNA-protein complex; and
selecting a mutated scaffold antibody that binds to the second RNA-protein complex.

38. A library comprising a plurality of mutated scaffold antibodies produced by the method of claim 18.

39. An antibody that binds to tumor tissue, wherein the antibody comprises:
(a) a heavy chain variable region comprising HCDR1, HCDR2, and HCDR3 from Table 3B; and
a light chain variable region comprising LCDR1, LCDR2, and LCDR3 from Table 3B; or
(b) a heavy chain variable region (V_{H}) and a light chain variable region (V_{L}) from Table 3 Å; or
(c) a heavy chain variable region comprising:
an HCDR1 comprising the sequence GFTFSKAWMS (SEQ ID NO: 1), or a variant HCDR1 in which 1, 2, 3, 4, or 5 amino acids are substituted relative to the sequence;
an HCDR2 comprising the sequence RIKSVTDGETTDYAAPVKG (SEQ ID NO: 9), or a variant HCDR2 in which 1, 2, 3, 4, or 5 amino acids are substituted relative to the sequence; and
an HCDR3 comprising the sequence of an HCDR3 set forth in Table 3B, or a variant HCDR3 in which 1, 2, 3, 4, or 5 amino acids are substituted relative to the sequence; and
a light chain variable region comprising:
an LCDR1 comprising the sequence SGSSSNIGSSSVS (SEQ ID NO: 48), or a variant LCDR1 in which 1, 2, 3, 4, or 5 amino acids are substituted relative to the sequence;
an LCDR2 comprising the sequence KNNQRPS (SEQ ID NO: 59), or variant LCDR2 in which 1, 2, or 3 amino acids are substituted relative to the sequence; and
an LCDR3 comprising the sequence STWDDSLSVRV (SEQ ID NO: 68), or a variant LCDR3 in which 1, 2, 3, 4, or 5 amino acids are substituted relative to the sequence.

40. (canceled)

41. The antibody of claim 39, wherein the antibody comprises a CDR3 sequence: TSSFCGGPSHDTSYCGGQYKSYYYMDV (SEQ ID NO: 1734),
TSSFCCRSGGSCPSHDTSYCGGQYKSYYYMDV (SEQ ID NO: 1735),
TSSFCCRGGGSCPSHDTSYCGGQYKSYYYMDV (SEQ ID NO: 1730),
TSSFCCRGGGGSCPSHDTSYCGGQYKSYYYMDV (SEQ ID NO: 1737),
TSSFCCRGGSGGSCPSHDTSYCGGQYKSYYYMDV (SEQ ID NO: 1738),
TSSFSCRGGSCPSHDTSYGGQYKSYYYMDV (SEQ ID NO: 1739),
TSSFCCRGGSCPSHDTSYCGGGQYKSYYYMDV (SEQ ID NO: 1740),
TSSFCCRGGSCPSHDTSYCGGGSGYKSYYYMDV (SEQ ID NO: 1741),
TSSFCCRGGSCPSHDTSYCGGQKSYYYMDV (SEQ ID NO: 1742),
TSSFCCRGGSCPSHDTSYCGGQYSYYYMDV (SEQ ID NO: 1743),
TSSFCCRGGSCPSHDTSYCGQYKSYYYMDV (SEQ ID NO: 1744), or
TSSFCCRGGSCPSHDTSYCGGQYKSSYYYMDV (SEQ ID NO: 1745); or a variant thereof having 1, 2, or 3 amino acid substitutions.

42. The antibody of claim 41, wherein
the HCDR1 comprises the sequence GFTFSKAWMS (SEQ ID NO: 1),
the HCDR2 comprises the sequence RIKSVTDGETTDYAAPVKG (SEQ ID NO: 9),
the HCDR3 comprises the sequence
TSSFCCRGGSCPSHDTSYCGQYKSYYYMDV (SEQ ID NO: 1744) or
TSSFCCRGGSCPSHDTSYCGGQYKSSYYYMDV (SEQ ID NO: 1745),
the LCDR1 comprises the sequence SGSSSNIGSSSVS (SEQ ID NO: 48),
the LCDR2 comprises the sequence KNNQRPS (SEQ ID NO: 59), and
the LCDR3 comprises the sequence STWDDSLSVRV (SEQ ID NO: 68).

43.-44. (canceled)

The application's sequence listing, which the Patent Office published only in electronic form, follows.

SEQUENCE LISTING (1766 sequences)

SEQ ID NO: 1 - protein, 10 aa, synthetic construct
  REGION 1..10: note = Description of Artificial Sequence: Synthetic peptide
GFTFSKAWMS

SEQ ID NO: 2 - protein, 10 aa, synthetic construct
  REGION 1..10: note = Description of Artificial Sequence: Synthetic peptide
GFTYSAAWMS

SEQ ID NO: 3 - protein, 10 aa, synthetic construct
  REGION 1..10: note = Description of Artificial Sequence: Synthetic peptide
GFTFSMAWMS

SEQ ID NO: 4 - protein, 10 aa, synthetic construct
  REGION 1..10: note = Description of Artificial Sequence: Synthetic peptide
GFTFSAAWMS

SEQ ID NO: 5 - protein, 10 aa, synthetic construct
  REGION 1..10: note = Description of Artificial Sequence: Synthetic peptide
GFTYSKAWMS

SEQ ID NO: 6 - protein, 10 aa, synthetic construct
  REGION 1..10: note = Description of Artificial Sequence: Synthetic peptide
GFTFAKAWMS

SEQ ID NO: 7 - protein, 10 aa, synthetic construct
  REGION 1..10: note = Description of Artificial Sequence: Synthetic peptide
GFVFSKAWMS

SEQ ID NO: 8 - protein, 10 aa, synthetic construct
  REGION 1..10: note = Description of Artificial Sequence: Synthetic peptide
GFTFSKAWMT

SEQ ID NO: 9 - protein, 19 aa, synthetic construct
  REGION 1..19: note = Description of Artificial Sequence: Synthetic peptide
RIKSVTDGETTDYAAPVKG

SEQ ID NO: 10 - protein, 19 aa, synthetic construct
  REGION 1..19: note = Description of Artificial Sequence: Synthetic peptide
RIKAVHDGETTDYAAPVKG

SEQ ID NO: 11 - protein, 19 aa, synthetic construct
  REGION 1..19: note = Description of Artificial Sequence: Synthetic peptide
RIKSNTDAETTDYAAPVKG

SEQ ID NO: 12 - protein, 19 aa, synthetic construct
  REGION 1..19: note = Description of Artificial Sequence: Synthetic peptide
RIKSVQDGETTDYAAPVKG

SEQ ID NO: 13 - protein, 19 aa, synthetic construct
  REGION 1..19: note = Description of Artificial Sequence: Synthetic peptide
RIKSVTDGHTTDYAAPVKG

SEQ ID NO: 14 - protein, 19 aa, synthetic construct
  REGION 1..19: note = Description of Artificial Sequence: Synthetic peptide
RIKSVTDGGITDYAAPVKG

SEQ ID NO: 15 - protein, 19 aa, synthetic construct
  REGION 1..19: note = Description of Artificial Sequence: Synthetic peptide
RIKSTSDGETTDYAAPVKG

SEQ ID NO: 16 - protein, 19 aa, synthetic construct
  REGION 1..19: note = Description of Artificial Sequence: Synthetic peptide
RIKSTSDGGITDYAAPVKG

SEQ ID NO: 17 - protein, 19 aa, synthetic construct
  REGION 1..19: note = Description of Artificial Sequence: Synthetic peptide
RIKSVTEGETTDYAAPVKG

SEQ ID NO: 18 - protein, 19 aa, synthetic construct
  REGION 1..19: note = Description of Artificial Sequence: Synthetic peptide
RIKSVTDGEQTDYAAPVKG

SEQ ID NO: 19 - protein, 19 aa, synthetic construct
  REGION 1..19: note = Description of Artificial Sequence: Synthetic peptide
RIKAADDGKQTDYAAPVKG

SEQ ID NO: 20 - protein, 31 aa, synthetic construct
  REGION 1..31: note = Description of Artificial Sequence: Synthetic polypeptide
TSSFCCRSGSCPSSDTSYCNGQYKSYYYMDV

SEQ ID NO: 21 - protein, 31 aa, synthetic construct
  REGION 1..31: note = Description of Artificial Sequence: Synthetic polypeptide
TSSFCCRGGSCPSHDTSYCGGQYKSYYYMDV

SEQ ID NO: 22 - protein, 31 aa, synthetic construct
  REGION 1..31: note = Description of Artificial Sequence: Synthetic polypeptide
TTSFCCRGASCPSSDTSYCAGSYKSYYFVNI

SEQ ID NO: 23 - protein, 31 aa, synthetic construct
  REGION 1..31: note = Description of Artificial Sequence: Synthetic polypeptide
TSSFCCRGNQCPSSDTSYCGGQYPSYYYMDP

SEQ ID NO: 24 - protein, 31 aa, synthetic construct
  REGION 1..31: note = Description of Artificial Sequence: Synthetic polypeptide
ISSFCCRGKQCPSSDTSYCNGYYADYYFMDV

SEQ ID NO: 25 - protein, 31 aa, synthetic construct
  REGION 1..31: note = Description of Artificial Sequence: Synthetic polypeptide
ISSFCCRGKQCPSSDTSYCGGQFKSYYFMDV

SEQ ID NO: 26 - protein, 31 aa, synthetic construct
  REGION 1..31: note = Description of Artificial Sequence: Synthetic polypeptide
ISSFCCHSNNCPSSDTSYCNGYYKQYYFMDV

SEQ ID NO: 27 - protein, 31 aa, synthetic construct
  REGION 1..31: note = Description of Artificial Sequence: Synthetic polypeptide
ISSFCCRGNSCPSSDTSYCNGQYKSYYYMDV

SEQ ID NO: 28 - protein, 31 aa, synthetic construct
  REGION 1..31: note = Description of Artificial Sequence: Synthetic polypeptide
TSSFCCRGGSCPSHDTSYCGGQYKSFYYMDV

SEQ ID NO: 29 - protein, 31 aa, synthetic construct
  REGION 1..31: note = Description of Artificial Sequence: Synthetic polypeptide
ISSFCCRGNSCPSSDTSYCNGQYKSYYFMDV

SEQ ID NO: 30 - protein, 31 aa, synthetic construct
  REGION 1..31: note = Description of Artificial Sequence: Synthetic polypeptide
ISSFCCRGGSCPSRDTSYCGGQYKSYYFMDV

SEQ ID NO: 31 - protein, 31 aa, synthetic construct
  REGION 1..31: note = Description of Artificial Sequence: Synthetic polypeptide
TSSFCCRGGSCPSSDTSYCGGYYKSYYFMDV

SEQ ID NO: 32 - protein, 31 aa, synthetic construct
  REGION 1..31: note = Description of Artificial Sequence: Synthetic polypeptide
TSSFCCRGGSCPSSDTSYCGGQYKSYYFMDV

SEQ ID NO: 33 - protein, 31 aa, synthetic construct
  REGION 1..31: note = Description of Artificial Sequence: Synthetic polypeptide
TSSFCCRGGSCPSHDTSYCGGYYKSYYYMDV

SEQ ID NO: 34 - protein, 31 aa, synthetic construct
  REGION 1..31: note = Description of Artificial Sequence: Synthetic polypeptide
TSSFCCRGGSCPSHDTSFCGGQDKRYYYMDV

SEQ ID NO: 35 - protein, 31 aa, synthetic construct
  REGION 1..31: note = Description of Artificial Sequence: Synthetic polypeptide
TTSFCCRGGSCPSHDTSFCGGQDKRYYYMDV

SEQ ID NO: 36 - protein, 31 aa, synthetic construct
  REGION 1..31: note = Description of Artificial Sequence: Synthetic polypeptide
TSSFCCRGGSCPSHDTSFCGGQYNRYYYMDV

SEQ ID NO: 37 - protein, 31 aa, synthetic construct
  REGION 1..31: note = Description of Artificial Sequence: Synthetic polypeptide
TSSFCCRGGSCPSHDTSFCGGQYKSYYYMDV

SEQ ID NO: 38 - protein, 31 aa, synthetic construct
  REGION 1..31: note = Description of Artificial Sequence: Synthetic polypeptide
TTSFCCRGGRCPSRDTSFCGGQYNSYYYMDV

SEQ ID NO: 39 - protein, 31 aa, synthetic construct
  REGION 1..31: note = Description of Artificial Sequence: Synthetic polypeptide
TTSFCCRGGSCPSHDTSFCGGQYKSYYYMDV

SEQ ID NO: 40 - protein, 31 aa, synthetic construct
  REGION 1..31: note = Description of Artificial Sequence: Synthetic polypeptide
TSSFCCRGGSCPSHDTSFCGGQDSRYYYMDV

SEQ ID NO: 41 - protein, 31 aa, synthetic construct
  REGION 1..31: note = Description of Artificial Sequence: Synthetic polypeptide
TSSFCCRGGSCPSHDTSFCGGSYKSYYYMDV

SEQ ID NO: 42 - protein, 31 aa, synthetic construct
  REGION 1..31: note = Description of Artificial Sequence: Synthetic polypeptide
TSSFCCRGGSCPSHDTSYCGGQDSRYYYMDV

SEQ ID NO: 43 - protein, 31 aa, synthetic construct
  REGION 1..31: note = Description of Artificial Sequence: Synthetic polypeptide
TSSFCCRGGSCPSHDTSYCGGQYKSYYFMDV

SEQ ID NO: 44 - protein, 31 aa, synthetic construct
  REGION 1..31: note = Description of Artificial Sequence: Synthetic polypeptide
TSSFCCRGGSCPSHDTSYCGGQNKQYYYMDV

SEQ ID NO: 45 - protein, 31 aa, synthetic construct
  REGION 1..31: note = Description of Artificial Sequence: Synthetic polypeptide
TSSFCCRGGNCPSHETSYCGNQYKSYYYMDV

SEQ ID NO: 46 - protein, 31 aa, synthetic construct
  REGION 1..31: note = Description of Artificial Sequence: Synthetic polypeptide
TSSFCCRGGSCPSHDTSYCGGQYKSYYYVNI

SEQ ID NO: 47 - protein, 31 aa, synthetic construct
  REGION 1..31: note = Description of Artificial Sequence: Synthetic polypeptide
TTSFCCRGASCPSHDTSYCAGSYKSYYYMDV

SEQ ID NO: 48 - protein, 13 aa, synthetic construct
  REGION 1..13: note = Description of Artificial Sequence: Synthetic peptide
SGSSSNIGSSSVS

SEQ ID NO: 49 - protein, 13 aa, synthetic construct
  REGION 1..13: note = Description of Artificial Sequence: Synthetic peptide
SGSSTNIGSSSVT

SEQ ID NO: 50 - protein, 13 aa, synthetic construct
  REGION 1..13: note = Description of Artificial Sequence: Synthetic peptide
SGSKSNIGSSYVS

SEQ ID NO: 51 - protein, 13 aa, synthetic construct
  REGION 1..13: note = Description of Artificial Sequence: Synthetic peptide
SGSKSNIGSSSVS

SEQ ID NO: 52 - protein, 13 aa, synthetic construct
  REGION 1..13: note = Description of Artificial Sequence: Synthetic peptide
SGASSNIGSSSVS

SEQ ID NO: 53 - protein, 13 aa, synthetic construct
  REGION 1..13: note = Description of Artificial Sequence: Synthetic peptide
SGSSTNIGSSTVS

SEQ ID NO: 54 - protein, 13 aa, synthetic construct
  REGION 1..13: note = Description of Artificial Sequence: Synthetic peptide
SGSSTNIGSSSVS

SEQ ID NO: 55 - protein, 13 aa, synthetic construct
  REGION 1..13: note = Description of Artificial Sequence: Synthetic peptide
SGSKSNIGSSSVY

SEQ ID NO: 56 - protein, 13 aa, synthetic construct
  REGION 1..13: note = Description of Artificial Sequence: Synthetic peptide
SGSSSNIGSSSVY

SEQ ID NO: 57 - protein, 13 aa, synthetic construct
  REGION 1..13: note = Description of Artificial Sequence: Synthetic peptide
SGSSSDIGSSSVS

SEQ ID NO: 58 - protein, 13 aa, synthetic construct
  REGION 1..13: note = Description of Artificial Sequence: Synthetic peptide
SGSPSNIGSSSVS

SEQ ID NO: 59 - protein, 7 aa, synthetic construct
  REGION 1..7: note = Description of Artificial Sequence: Synthetic peptide
KNNQRPS

SEQ ID NO: 60 - protein, 7 aa, synthetic construct
  REGION 1..7: note = Description of Artificial Sequence: Synthetic peptide
KDNQRPL

SEQ ID NO: 61 - protein, 7 aa, synthetic construct
  REGION 1..7: note = Description of Artificial Sequence: Synthetic peptide
MNNQRPY

SEQ ID NO: 62 - protein, 7 aa, synthetic construct
  REGION 1..7: note = Description of Artificial Sequence: Synthetic peptide
KDNQRPS

SEQ ID NO: 63 - protein, 7 aa, synthetic construct
  REGION 1..7: note = Description of Artificial Sequence: Synthetic peptide
KNTQRAS

SEQ ID NO: 64 - protein, 7 aa, synthetic construct
  REGION 1..7: note = Description of Artificial Sequence: Synthetic peptide
KNNARPY

SEQ ID NO: 65 - protein, 7 aa, synthetic construct
  REGION 1..7: note = Description of Artificial Sequence: Synthetic peptide
KNTQRPS

SEQ ID NO: 66 - protein, 7 aa, synthetic construct
  REGION 1..7: note = Description of Artificial Sequence: Synthetic peptide
KNNQRPY

SEQ ID NO: 67 - protein, 7 aa, synthetic construct
  REGION 1..7: note = Description of Artificial Sequence: Synthetic peptide
KNSLRPQ

SEQ ID NO: 68 - protein, 11 aa, synthetic construct
  REGION 1..11: note = Description of Artificial Sequence: Synthetic peptide
STWDDSLSVRV

SEQ ID NO: 69 - protein, 11 aa, synthetic construct
  REGION 1..11: note = Description of Artificial Sequence: Synthetic peptide
ATWDDQLSVRV

SEQ ID NO: 70 - protein, 11 aa, synthetic construct
  REGION 1..11: note = Description of Artificial Sequence: Synthetic peptide
ATWDNSLSIRV

SEQ ID NO: 71 - protein, 11 aa, synthetic construct
  REGION 1..11: note = Description of Artificial Sequence: Synthetic peptide
SSWDDSNSVRI

SEQ ID NO: 72 - protein, 11 aa, synthetic construct
  REGION 1..11: note = Description of Artificial Sequence: Synthetic peptide
STWDDALSVRV

SEQ ID NO: 73 - protein, 11 aa, synthetic construct
  REGION 1..11: note = Description of Artificial Sequence: Synthetic peptide
STWDESLSVRV

SEQ ID NO: 74 - protein, 11 aa, synthetic construct
  REGION 1..11: note = Description of Artificial Sequence: Synthetic peptide
STWNDALSVRV

SEQ ID NO: 75 - protein, 11 aa, synthetic construct
  REGION 1..11: note = Description of Artificial Sequence: Synthetic peptide
STWDDSLNVRV

SEQ ID NO: 76 - protein, 11 aa, synthetic construct
  REGION 1..11: note = Description of Artificial Sequence: Synthetic peptide
ATWDDSLTVRI

SEQ ID NO: 77 - protein, 140 aa, synthetic construct
  REGION 1..140: note = Description of Artificial Sequence: Synthetic polypeptide
EVQLVESGGALVKPGGSLRLSCAASGFTFSKAWMSWVRQAPGKGLEWVGRIKSVTDGETTDYAAPVKGRFTISRDDSKSTLYLQMNSLKTEDTAVYYCTSSFCCRSGSCPSSDTSYCNGQYKSYYYMDVWGKGTTVTVSS

SEQ ID NO: 78 - protein, 140 aa, synthetic construct
  REGION 1..140: note = Description of Artificial Sequence: Synthetic polypeptide
EVQLVESGGGLVQPGGSLRLSCAASGFTFSKAWMSWVRQAPGKGLEWVGRIKSVTDGETTEYAASVKGRFTISRDDSKNSLYLQMNSLKTEDTAVYYCTSSFCCRGGSCPSHDTSYCGGQYKSYYYMDVWGKGTTVTVSS

SEQ ID NO: 79 - protein, 140 aa, synthetic construct
  REGION 1..140: note = Description of Artificial Sequence: Synthetic polypeptide
EVQLVESGGALVKPGGSLRLSCAASGFTFSKAWMSWVRQAPGKGLEWVGRIKSVTDGETTDYAAPVKGRFTISRDDSKSTLYLQMNSLKTEDTAVYYCTTSFCCRGASCPSSDTSYCAGSYKSYYFVNIWGKGTTVTVSS

SEQ ID NO: 80 - protein, 140 aa, synthetic construct
  REGION 1..140: note = Description of Artificial Sequence: Synthetic polypeptide
EVQLVESGGALVKPGGSLRLSCAASGFTFSKAWMSWVRQAPGKGLEWVGRIKSVTDGETTDYAAPVKGRFTISRDDSKSTLYLQMNSLKTEDTAVYYCTSSFCCRGNQCPSSDTSYCGGQYPSYYYMDPWGKGTTVTVSS

SEQ ID NO: 81 - protein, 140 aa, synthetic construct
  REGION 1..140: note = Description of Artificial Sequence: Synthetic polypeptide
EVQLVESGGALVKPGGSLRLSCAASGFTFSKAWMSWVRQAPGKGLEWVGRIKSVTDGETTDYAAPVKGRFTISRDDSKSTLYLQMNSLKTEDTAVYYCISSFCCRGKQCPSSDTSYCNGYYADYYFMDVWGKGTTVTVSS

SEQ ID NO: 82 - protein, 140 aa, synthetic construct
  REGION 1..140: note = Description of Artificial Sequence: Synthetic polypeptide
EVQLVESGGALVKPGGSLRLSCAASGFTFSKAWMSWVRQAPGKGLEWVGRIKSVTDGETTDYAAPVKGRFTISRDDSKSTLYLQMNSLKTEDTAVYYCISSFCCRGKQCPSSDTSYCGGQFKSYYFMDVWGKGTTVTVSS

SEQ ID NO: 83 - protein, 140 aa, synthetic construct
  REGION 1..140: note = Description of Artificial Sequence: Synthetic polypeptide
EVQLVESGGALVKPGGSLRLSCAASGFTFSKAWMSWVRQAPGKGLEWVGRIKSVTDGETTDYAAPVKGRFTISRDDSKSTLYLQMNSLKTEDTAVYYCISSFCCHSNNCPSSDTSYCNGYYKQYYFMDVWGKGTTVTVSS

SEQ ID NO: 84 - protein, 140 aa, synthetic construct
  REGION 1..140: note = Description of Artificial Sequence: Synthetic polypeptide
EVQLVESGGALVKPGGSLRLSCAASGFTYSAAWMSWVRQAPGKGLEWVGRIKAVHDGETTDYAAPVKGRFTISRDDSKSTLYLQMNSLKTEDTAVYYCTSSFCCRGGSCPSHDTSYCGGQYKSYYYMDVWGKGTTVTVSS

SEQ ID NO: 85 - protein, 140 aa, synthetic construct
  REGION 1..140: note = Description of Artificial Sequence: Synthetic polypeptide
EVQLVESGGALVKPGGSLRLSCAASGFTFSMAWMSWVRQAPGKGLEWVGRIKSNTDAETTDYAAPVKGRFTISRDDSKSTLYLQMNSLKTEDTAVYYCTSSFCCRGGSCPSHDTSYCGGQYKSYYYMDVWGKGTTVTVSS

SEQ ID NO: 86 - protein, 140 aa, synthetic construct
  REGION 1..140: note = Description of Artificial Sequence: Synthetic polypeptide
EVQLVESGGALVKPGGSLRLSCAASGFTFSAAWMSWVRQAPGKGLEWVGRIKSVTDGETTDYAAPVKGRFTISRDDSKSTLYLQMNSLKTEDTAVYYCISSFCCRGNSCPSSDTSYCNGQYKSYYYMDVWGKGTTVTVSS

SEQ ID NO: 87 - protein, 140 aa, synthetic construct
  REGION 1..140: note = Description of Artificial Sequence: Synthetic polypeptide
EVQLVESGGALVKPGGSLRLSCAASGFTYSKAWMSWVRQAPGKGLEWVGRIKSVQDGETTDYAAPVKGRFTISRDDSKSTLYLQMNSLKTEDTAVYYCTSSFCCRGGSCPSHDTSYCGGQYKSFYYMDVWGKGTTVTVSS

SEQ ID NO: 88 - protein, 140 aa, synthetic construct
  REGION 1..140: note = Description of Artificial Sequence: Synthetic polypeptide
EVQLVESGGALVKPGGSLRLSCAASGFTFAKAWMSWVRQAPGKGLEWVGRIKSVTDGHTTDYAAPVKGRFTISRDDSKSTLYLQMNSLKTEDTAVYYCTSSFCCRGGSCPSHDTSYCGGQYKSYYYMDVWGKGTTVTVSS

SEQ ID NO: 89 - protein, 140 aa, synthetic construct
  REGION 1..140: note = Description of Artificial Sequence: Synthetic polypeptide
EVQLVESGGALVKPGGSLRLSCAASGFVFSKAWMSWVRQAPGKGLEWVGRIKSVTDGGITDYAAPVKGRFTISRDDSKSTLYLQMNSLKTEDTAVYYCISSFCCRGNSCPSSDTSYCNGQYKSYYFMDVWGKGTTVTVSS

SEQ ID NO: 90 - protein, 140 aa, synthetic construct
  REGION 1..140: note = Description of Artificial Sequence: Synthetic polypeptide
EVQLVESGGALVKPGGSLRLSCAASGFTFSAAWMSWVRQAPGKGLEWVGRIKSTSDGETTDYAAPVKGRFTISRDDSKSTLYLQMNSLKTEDTAVYYCISSFCCRGGSCPSRDTSYCGGQYKSYYFMDVWGKGTTVTVSS

SEQ ID NO: 91 - protein, 140 aa, synthetic construct
  REGION 1..140: note = Description of Artificial Sequence: Synthetic polypeptide
EVQLVESGGALVKPGGSLRLSCAASGFTFSKAWMSWVRQAPGKGLEWVGRIKSVQDGETTDYAAPVKGRFTISRDDSKSTLYLQMNSLKTEDTAVYYCTSSFCCRGGSCPSSDTSYCGGYYKSYYFMDVWGKGTTVTVSS

SEQ ID NO: 92 - protein, 140 aa, synthetic construct
  REGION 1..140: note = Description of Artificial Sequence: Synthetic polypeptide
EVQLVESGGALVKPGGSLRLSCAASGFTFSKAWMSWVRQAPGKGLEWVGRIKSVTDGETTDYAAPVKGRFTISRDDSKSTLYLQMNSLKTEDTAVYYCTSSFCCRGGSCPSSDTSYCGGQYKSYYFMDVWGKGTTVTVSS

SEQ ID NO: 93 - protein, 140 aa, synthetic construct
  REGION 1..140: note = Description of Artificial Sequence: Synthetic polypeptide
EVQLVESGGALVKPGGSLRLSCAASGFTFSKAWMSWVRQAPGKGLEWVGRIKSVQDGETTDYAAPVKGRFTISRDDSKSTLYLQMNSLKTEDTAVYYCTSSFCCRGGSCPSHDTSYCGGYYKSYYYMDVWGKGTTVTVSS

SEQ ID NO: 94 - protein, 140 aa, synthetic construct
  REGION 1..140: note = Description of Artificial Sequence: Synthetic polypeptide
EVQLVESGGALVKPGGSLRLSCAASGFTFSKAWMSWVRQAPGKGLEWVGRIKSVTDGETTDYAAPVKGRFTISRDDSKSTLYLQMNSLKTEDTAVYYCTSSFCCRGGSCPSHDTSYCGGQYKSYYYMDVWGKGTTVTVSS

SEQ ID NO: 95 - protein, 140 aa, synthetic construct
  REGION 1..140: note = Description of Artificial Sequence: Synthetic polypeptide
EVQLVESGGALVKPGGSLRLSCAASGFTFSKAWMTWVRQAPGKGLEWVGRIKSVTDGETTDYAAPVKGRFTISRDDSKSVLYLQMSSLKTEDTAVYFCTSSFCCRGGSCPSHDTSFCGGQDKRYYYMDVWGKGTTVTVSS

SEQ ID NO: 96 - protein, 140 aa, synthetic construct
  REGION 1..140: note = Description of Artificial Sequence: Synthetic polypeptide
EVQLVESGGGLVKPGGSLRLSCAASGFTFSKAWMTWVRQAPGKGLEWVGRIKSVTDGETTDYAAPVKGRFTISRDDSKNTLYLQMNSLKTEDTAVYYCTTSFCCRGGSCPSHDTSFCGGQDKRYYYMDVWGQGTTVTVSS

SEQ ID NO: 97 - protein, 140 aa, synthetic construct
  REGION 1..140: note = Description of Artificial Sequence: Synthetic polypeptide
EVQLVESGGALVKPGGSLRLSCAASGFTFSKAWMTWVRQAPGKGLEWVGRIKSVTDGETTDYAAPVKGRFTISRDDSKSVLYLQMSSLKTEDTAVYFCTSSFCCRGGSCPSHDTSFCGGQYNRYYYMDVWGKGTTVTVSS

SEQ ID NO: 98 - protein, 140 aa, synthetic construct
  REGION 1..140: note = Description of Artificial Sequence: Synthetic polypeptide
EVQLVESGGALVKPGGSLRLSCAASGFTFSKAWMTWVRQAPGKGLEWVGRIKSVTDGETTDYAAPVKGRFTISRDDSKSVLYLQMSSLKTEDTAVYFCTSSFCCRGGSCPSHDTSFCGGQYKSYYYMDVWGKGTTVTVSS

SEQ ID NO: 99 - protein, 140 aa, synthetic construct
  REGION 1..140: note = Description of Artificial Sequence: Synthetic polypeptide
EVQLVESGGGLVKPGGSLRLSCAASGFTFSKAWMTWVRQAPGKGLEWVGRIKSTSDGGITDYAAPVKGRFTISRDDSKNTLYLQMNSLKTEDTAVYYCTTSFCCRGGRCPSRDTSFCGGQYNSYYYMDVWGQGTTVTVSS

SEQ ID NO: 100 - protein, 140 aa, synthetic construct
  REGION 1..140: note = Description of Artificial Sequence: Synthetic polypeptide
EVQLVESGGALVKPGGSLRLSCAASGFTFSKAWMTWVRQAPGKGLEWVGRIKSVTDGETTDYAAPVKGRFTISRDDSKSTLYLQMNSLKTEDTAVYYCTSSFCCRGGSCPSHDTSFCGGQDKRYYYMDVWGKGTTVTVSS

SEQ ID NO: 101 - protein, 140 aa, synthetic construct
  REGION 1..140: note = Description of Artificial Sequence: Synthetic polypeptide
EVQLVESGGALVKPGGSLRLSCAASGFTFSKAWMTWVRQAPGKGLEWVGRIKSVTDGETTDYAAPVKGRFTISRDDSKSTLYLQMNSLKTEDTAVYYCTSSFCCRGGSCPSHDTSFCGGQYKSYYYMDVWGKGTTVTVSS

SEQ ID NO: 102 - protein, 140 aa, synthetic construct
  REGION 1..140: note = Description of Artificial Sequence: Synthetic polypeptide
EVQLVESGGGLVKPGGSLRLSCAASGFTFSKAWMTWVRQAPGKGLEWVGRIKSVTDGETTDYAAPVKGRFTISRDDSKNTLYLQMNSLKTEDTAVYYCTTSFCCRGGSCPSHDTSFCGGQYKSYYYMDVWGQGTTVTVSS

SEQ ID NO: 103 - protein, 140 aa, synthetic construct
  REGION 1..140: note = Description of Artificial Sequence: Synthetic polypeptide
EVQLVESGGALVKPGGSLRLSCAASGFTFSKAWMTWVRQAPGKGLEWVGRIKSVTDGETTDYAAPVKGRFTISRDDSKSTLYLQMNSLKTEDTAVYYCTSSFCCRGGSCPSHDTSFCGGQDSRYYYMDVWGKGTTVTVSS

SEQ ID NO: 104 - protein, 140 aa, synthetic construct
  REGION 1..140: note = Description of Artificial Sequence: Synthetic polypeptide
EVQLVESGGALVKPGGSLRLSCAASGFTFSKAWMTWVRQAPGKGLEWVGRIKSVTDGETTDYAAPVKGRFTISRDDSKSTLYLQMNSLKTEDTAVYYCTSSFCCRGGSCPSHDTSYCGGQYKSYYYMDVWGKGTTVTVSS

SEQ ID NO: 105 - protein, 140 aa, synthetic construct; identical to SEQ ID NO: 101
  REGION 1..140: note = Description of Artificial Sequence: Synthetic polypeptide

SEQ ID NO: 106 - protein, 140 aa, synthetic construct
  REGION 1..140: note = Description of Artificial Sequence: Synthetic polypeptide
EVQLVESGGALVKPGGSLRLSCAASGFTFSKAWMSWVRQAPGKGLEWVGRIKSVTDGETTDYAAPVKGRFTISRDDSKSTLYLQMNSLKTEDTAVYYCTSSFCCRGGSCPSHDTSFCGGQYKSYYYMDVWGKGTTVTVSS

SEQ ID NO: 107 - protein, 140 aa, synthetic construct
  REGION 1..140: note = Description of Artificial Sequence: Synthetic polypeptide
EVQLVESGGALVKPGGSLRLSCAASGFTFSKAWMTWVRQAPGKGLEWVGRIKSVTDGETTDYAAPVKGRFTISRDDSKSTLYLQMNSLKTEDTAVYYCTSSFCCRGGSCPSHDTSFCGGSYKSYYYMDVWGKGTTVTVSS

SEQ ID NO: 108 - protein, 140 aa, synthetic construct
  REGION 1..140: note = Description of Artificial Sequence: Synthetic polypeptide
EVQLVESGGALVKPGGSLRLSCAASGFTFSKAWMTWVRQAPGKGLEWVGRIKSVTDGETTDYAAPVKGRFTISRDDSKSTLYLQMNSLKTEDTAVYYCTSSFCCRGGSCPSHDTSYCGGQDSRYYYMDVWGKGTTVTVSS

SEQ ID NO: 109 - protein, 140 aa, synthetic construct
  REGION 1..140: note = Description of Artificial Sequence: Synthetic polypeptide
EVQLVESGGGLVKPGGSLRLSCAASGFTFSKAWMTWVRQAPGKGLEWVGRIKSVTEGETTDYAAPVKGRFTISRDDSKNTLYLQMNSLKTEDTAVYYCTTSFCCRGGSCPSHDTSFCGGQYKSYYYMDVWGQGTTVTVSS

SEQ ID NO: 110 - protein, 140 aa, synthetic construct
  REGION 1..140: note = Description of Artificial Sequence: Synthetic polypeptide
EVQLVESGGALVKPGGSLRLSCAASGFTFSKAWMTWVRQAPGKGLEWVGRIKSVTEGETTDYAAPVKGRFTISRDDSKSTLYLQMNSLKTEDTAVYYCTSSFCCRGGSCPSHDTSFCGGQYKSYYYMDVWGKGTTVTVSS

SEQ ID NO: 111 - protein, 140 aa, synthetic construct
  REGION 1..140: note = Description of Artificial Sequence: Synthetic polypeptide
EVQLVESGGALVKPGGSLRLSCAASGFTFSKAWMSWVRQAPGKGLEWVGRIKSVTDGETTDYAAPVKGRFTISRDDSKSTLYLQMNSLKTEDTAVYYCTSSFCCRGGSCPSHDTSYCGGQYKSYYFMDVWGKGTTVTVSS

SEQ ID NO: 112 - protein, 140 aa, synthetic construct; identical to SEQ ID NO: 94
  REGION 1..140: note = Description of Artificial Sequence: Synthetic polypeptide

SEQ ID NO: 113 - protein, 140 aa, synthetic construct
  REGION 1..140: note = Description of Artificial Sequence: Synthetic polypeptide
EVQLVESGGALVKPGGSLRLSCAASGFTFSKAWMSWVRQAPGKGLEWVGRIKSVTDGETTDYAAPVKGRFTISRDDSKSTLYLQMNSLKTEDTAVYYCTSSFCCRGGSCPSHDTSYCGGQNKQYYYMDVWGKGTTVTVSS

SEQ ID NO: 114 - protein, 140 aa, synthetic construct
  REGION 1..140: note = Description of Artificial Sequence: Synthetic polypeptide
EVQLVESGGALVKPGGSLRLSCAASGFTFSKAWMSWVRQAPGKGLEWVGRIKSVTDGETTDYAAPVKGRFTISRDDSKSTLYLQMNSLKTEDTAVYYCTSSFCCRGGNCPSHETSYCGNQYKSYYYMDVWGKGTTVTVSS

SEQ ID NO: 115 - protein, 140 aa, synthetic construct
  REGION 1..140: note = Description of Artificial Sequence: Synthetic polypeptide
EVQLVESGGALVKPGGSLRLSCAASGFTFSKAWMSWVRQAPGKGLEWVGRIKSVTDGETTDYAAPVKGRFTISRDDSKSTLYLQMNSLKTEDTAVYYCTSSFCCRGGSCPSHDTSYCGGQYKSYYYVNIWGKGTTVTVSS

SEQ ID NO: 116 - protein, 140 aa, synthetic construct
  REGION 1..140: note = Description of Artificial Sequence: Synthetic polypeptide
EVQLVESGGALVKPGGSLRLSCAASGFTFSKAWMSWVRQAPGKGLEWVGRIKSVTDGETTDYAAPVKGRFTISRDDSKSTLYLQMNSLKTEDTAVYYCTTSFCCRGASCPSHDTSYCAGSYKSYYYMDVWGKGTTVTVSS

SEQ ID NO: 117 - protein, 140 aa, synthetic construct; identical to SEQ ID NO: 94
  REGION 1..140: note = Description of Artificial Sequence: Synthetic polypeptide

SEQ ID NO: 118 - protein, 140 aa, synthetic construct
  REGION 1..140: note = Description of Artificial Sequence: Synthetic polypeptide
EVQLVESGGALVKPGGSLRLSCAASGFTFSKAWMSWVRQAPGKGLEWVGRIKSVTDGEQTDYAAPVKGRFTISRDDSKSTLYLQMNSLKTEDTAVYYCTSSFCCRGGSCPSHDTSYCGGQYKSYYYMDVWGKGTTVTVSS

SEQ ID NO: 119 - protein, 140 aa, synthetic construct; identical to SEQ ID NO: 104
  REGION 1..140: note = Description of Artificial Sequence: Synthetic polypeptide

SEQ ID NO: 120 - protein, 140 aa, synthetic construct
  REGION 1..140: note = Description of Artificial Sequence: Synthetic polypeptide
EVQLVESGGALVKPGGSLRLSCAASGFTFSKAWMSWVRQAPGKGLEWVGRIKAADDGKQTDYAAPVKGRFTISRDDSKSTLYLQMNSLKTEDTAVYYCTSSFCCRGGSCPSHDTSYCGGQYKSYYYMDVWGKGTTVTVSS

SEQ ID NO: 121 - protein, 140 aa, synthetic construct
  REGION 1..140: note = Description of Artificial Sequence: Synthetic polypeptide
EVQLVESGGALVKPGGSLRLSCAASGFTFSKAWMSWVRQAPGKGLEWVGRIKSVTDGETTDYAAPVKGRFTISRDDSKSTLYLQMNSLKTEDTAVYYCISSFCCRGNSCPSSDTSYCNGQYKSYYYMDVWGKGTTVTVSS

SEQ ID NO: 122 - protein, 140 aa, synthetic construct; identical to SEQ ID NO: 94
  REGION 1..140: note = Description of Artificial Sequence: Synthetic polypeptide

SEQ ID NO: 123 - protein, 110 aa, synthetic construct
  REGION 1..110: note = Description of Artificial Sequence: Synthetic polypeptide
QSVLTQPPSASGTPGQRVTISCSGSSSNIGSSSVSWYQQLPGTAPKLLIYKNNQRPSGVPDRFSGSKSGTSASLAISGLRSEDEADYYCSTWDDSLSVRVFGGGTKLTVL

SEQ ID NO: 124 - protein, 110 aa, synthetic construct
  REGION 1..110: note = Description of Artificial Sequence: Synthetic polypeptide
QSVLTQPPSVSAAPGQKVTISCSGSSSNIGSSSVSWYQQLPGTAPKLLIYKNNQRPSGIPDRFSGSKSGTSATLGITGLQTGDEADYYCSTWDDSLSVRVFGGGTKLTVL

SEQ ID NO: 125 - protein, 110 aa, synthetic construct; identical to SEQ ID NO: 123
  REGION 1..110: note = Description of Artificial Sequence: Synthetic polypeptide

SEQ ID NO: 126 - protein, 110 aa, synthetic construct; identical to SEQ ID NO: 123
  REGION 1..110: note = Description of Artificial Sequence: Synthetic polypeptide

SEQ ID NO: 127 - protein, 110 aa, synthetic construct; identical to SEQ ID NO: 123
  REGION 1..110: note = Description of Artificial Sequence: Synthetic polypeptide

SEQ ID NO: 128 - protein, 110 aa, synthetic construct; identical to SEQ ID NO: 123
  REGION 1..110: note = Description of Artificial Sequence: Synthetic polypeptide

SEQ ID NO: 129 - protein, 110 aa, synthetic construct; identical to SEQ ID NO: 123
  REGION 1..110: note = Description of Artificial Sequence: Synthetic polypeptide

SEQ ID NO: 130 - protein, 110 aa, synthetic construct
  REGION 1..110: note = Description of Artificial Sequence: Synthetic polypeptide
QSVLTQPPSASGTPGQRVTISCSGSSTNIGSSSVTWYQQLPGTAPKLLIYKDNQRPLGVPDRFSGSKSGTSASLAISGLRSEDEADYYCSTWDDSLSVRVFGGGTKLTVL

SEQ ID NO: 131 - protein, 110 aa, synthetic construct
  REGION 1..110: note = Description of Artificial Sequence: Synthetic polypeptide
QSVLTQPPSASGTPGQRVTISCSGSKSNIGSSYVSWYQQLPGTAPKLLIYMNNQRPYGVPDRFSGSKSGTSASLAISGLRSEDEADYYCATWDDQLSVRVFGGGTKLTVL

SEQ ID NO: 132 - protein, 110 aa, synthetic construct
  REGION 1..110: note = Description of Artificial Sequence: Synthetic polypeptide
QSVLTQPPSASGTPGQRVTISCSGSKSNIGSSSVSWYQQLPGTAPKLLIYKDNQRPSGVPDRFSGSKSGTSASLAISGLRSEDEADYYCATWDNSLSIRVFGGGTKLTVL

SEQ ID NO: 133 - protein, 110 aa, synthetic construct
  REGION 1..110: note = Description of Artificial Sequence: Synthetic polypeptide
QSVLTQPPSASGTPGQRVTISCSGASSNIGSSSVSWYQQLPGTAPKLLIYKNTQRASGVPDRFSGSKSGTSASLAISGLRSEDEADYYCSSWDDSNSVRIFGGGTKLTVL

SEQ ID NO: 134 - protein, 110 aa, synthetic construct
  REGION 1..110: note = Description of Artificial Sequence: Synthetic polypeptide
QSVLTQPPSASGTPGQRVTISCSGSSTNIGSSTVSWYQQLPGTAPKLLIYKNNARPYGVPDRFSGSKSGTSASLAISGLRSEDEADYYCATWDDSLTVRIFGGGTKLTVL

SEQ ID NO: 135 - protein, 110 aa, synthetic construct
  REGION 1..110: note = Description of Artificial Sequence: Synthetic polypeptide
QSVLTQPPSASGTPGQRVTISCSGASSNIGSSSVSWYQQLPGTAPKLLIYKNTQRPSGVPDRFSGSKSGTSASLAISGLRSEDEADYYCATWDDQLSVRVFGGGTKLTVL

SEQ ID NO: 136 - protein, 110 aa, synthetic construct
  REGION 1..110: note = Description of Artificial Sequence: Synthetic polypeptide
QSVLTQPPSASGTPGQRVTISCSGSSTNIGSSSVSWYQQLPGTAPKLLIYKDNQRPSGVPDRFSGSKSGTSASLAISGLRSEDEADYYCSSWDDSNSVRIFGGGTKLTVL

SEQ ID NO: 137 - protein, 110 aa, synthetic construct
  REGION 1..110: note = Description of Artificial Sequence: Synthetic polypeptide
QSVLTQPPSASGTPGQRVTISCSGSKSNIGSSSVYWYQQLPGTAPKLLIYKNNQRPYGVPDRFSGSKSGTSASLAISGLRSEDEADYYCSTWDDALSVRVFGGGTKLTVL

SEQ ID NO: 138 - protein, 110 aa, synthetic construct
  REGION 1..110: note = Description of Artificial Sequence: Synthetic polypeptide
QSVLTQPPSASGTPGQRVTISCSGSSSNIGSSSVYWYQQLPGTAPKLLIYKNNQRPSGVPDRFSGSKSGTSASLAISGLRSEDEADYYCSTWDDALSVRVFGGGTKLTVL

SEQ ID NO: 139 - protein, 110 aa, synthetic construct
  REGION 1..110: note = Description of Artificial Sequence: Synthetic polypeptide
QSVLTQPPSASGTPGQRVTISCSGSKSNIGSSYVSWYQQLPGTAPKLLIYKNNQRPYGVPDRFSGSKSGTSASLAISGLRSEDEADYYCSTWDDSLSVRVFGGGTKLTVL

SEQ ID NO: 140 - protein, 110 aa, synthetic construct; identical to SEQ ID NO: 123
  REGION 1..110: note = Description of Artificial Sequence: Synthetic polypeptide

SEQ ID NO: 141 - protein, 110 aa, synthetic construct
  REGION 1..110: note = Description of Artificial Sequence: Synthetic polypeptide
QSVLTQAPSASETPGQRVIISCSGSSSNIGSSSVSWYQQLPGTAPKLLIYKNNQRPSGVPDRFSGSKSGTSASLAISGLRSEDEADYYCSTWDDSLSVRVFGGGTKLTVL

SEQ ID NO: 142 - protein, 110 aa, synthetic construct; identical to SEQ ID NO: 123
  REGION 1..110: note = Description of Artificial Sequence: Synthetic polypeptide

SEQ ID NO: 143 - protein, 110 aa, synthetic construct; identical to SEQ ID NO: 141
  REGION 1..110: note = Description of Artificial Sequence: Synthetic polypeptide

SEQ ID NO: 144 - protein, 110 aa, synthetic construct; identical to SEQ ID NO: 141
  REGION 1..110: note = Description of Artificial Sequence: Synthetic polypeptide

SEQ ID NO: 145 - protein, 110 aa, synthetic construct; identical to SEQ ID NO: 123
  REGION 1..110: note = Description of Artificial Sequence: Synthetic polypeptide

SEQ ID NO: 146 - protein, 110 aa, synthetic construct; identical to SEQ ID NO: 123
  REGION 1..110: note = Description of Artificial Sequence: Synthetic polypeptide

SEQ ID NO: 147 - protein, 110 aa, synthetic construct; identical to SEQ ID NO: 123
  REGION 1..110: note = Description of Artificial Sequence: Synthetic polypeptide

SEQ ID NO: 148 - protein, 110 aa, synthetic construct; identical to SEQ ID NO: 123
  REGION 1..110: note = Description of Artificial Sequence: Synthetic polypeptide

SEQ ID NO: 149 - protein, 110 aa, synthetic construct; identical to SEQ ID NO: 123
  REGION 1..110: note = Description of Artificial Sequence: Synthetic polypeptide

SEQ ID NO: 150 - protein, 110 aa, synthetic construct; identical to SEQ ID NO: 123
  REGION 1..110: note = Description of Artificial Sequence: Synthetic polypeptide

SEQ ID NO: 151 - protein, 110 aa, synthetic construct
  REGION 1..110: note = Description of Artificial Sequence: Synthetic polypeptide
QSVLTQPPSASGTPGQRVTISCSGSSSNIGSSSVSWYQQLPGTAPKLLIYKNNQRPSGVPDRFSGSKSGTSASLAISGLRSEDEADYYCSTWDESLSVRVFGGGTKLTVL

SEQ ID NO: 152 - protein, 110 aa, synthetic construct; identical to SEQ ID NO: 123
  REGION 1..110: note = Description of Artificial Sequence: Synthetic polypeptide

SEQ ID NO: 153 - protein, 110 aa, synthetic construct; identical to SEQ ID NO: 123
  REGION 1..110: note = Description of Artificial Sequence: Synthetic polypeptide

SEQ ID NO: 154 - protein, 110 aa, synthetic construct; identical to SEQ ID NO: 151
  REGION 1..110: note = Description of Artificial Sequence: Synthetic polypeptide

SEQ ID NO: 155 - protein, 110 aa, synthetic construct; identical to SEQ ID NO: 151
  REGION 1..110: note = Description of Artificial Sequence: Synthetic polypeptide

SEQ ID NO: 156 - protein, 110 aa, synthetic construct; identical to SEQ ID NO: 151
  REGION 1..110: note = Description of Artificial Sequence: Synthetic polypeptide

SEQ ID NO: 157 - protein, 110 aa, synthetic construct; identical to SEQ ID NO: 123
  REGION 1..110: note = Description of Artificial Sequence: Synthetic polypeptide

SEQ ID NO: 158 - protein, 110 aa, synthetic construct
  REGION 1..110: note = Description of Artificial Sequence: Synthetic polypeptide
QSVLTQPPSASGTPGQRVTISCSGSSSNIGSSSVYWYQQLPGTAPKLLIYKNNQRPSGVPDRFSGSKSGTSASLAISGLRSEDEADYYCSTWDDSLSVRVFGGGTKLTVL

SEQ ID NO: 159 - protein, 110 aa, synthetic construct; identical to SEQ ID NO: 123
  REGION 1..110: note = Description of Artificial Sequence: Synthetic polypeptide

SEQ ID NO: 160 - protein, 110 aa, synthetic construct; identical to SEQ ID NO: 123
  REGION 1..110: note = Description of Artificial Sequence: Synthetic polypeptide

SEQ ID NO: 161 - protein, 110 aa, synthetic construct; identical to SEQ ID NO: 123
  REGION 1..110: note = Description of Artificial Sequence: Synthetic polypeptide

SEQ ID NO: 162 - protein, 110 aa, synthetic construct; identical to SEQ ID NO: 123
  REGION 1..110: note = Description of Artificial Sequence: Synthetic polypeptide

SEQ ID NO: 163 - protein, 110 aa, synthetic construct
  REGION 1..110: note = Description of Artificial Sequence: Synthetic polypeptide
QSVLTQPPSASGTPGQRVTISCSGSSSDIGSSSVSWYQQLPGTAPKLLIYKNNQRPSGVPDRFSGSKSGTSASLAISGLRSEDEADYYCSTWNDALSVRVFGGGTKLTVL

SEQ ID NO: 164 - protein, 110 aa, synthetic construct
  REGION 1..110: note = Description of Artificial Sequence: Synthetic polypeptide
QSVLTQPPSASGTPGQRVTISCSGSSSNIGSSSVSWYQQLPGTAPKLLIYKNTQRPSGVPDRFSGSKSGTSASLAISGLRSEDEADYYCSTWDDSLNVRVFGGGTKLTVL

SEQ ID NO: 165 - protein, 110 aa, synthetic construct
  REGION 1..110: note = Description of Artificial Sequence: Synthetic polypeptide
QSVLTQPPSASGTPGQRVTISCSGSPSNIGSSSVSWYQQLPGTAPKLLIYKNNQRPSGVPDRFSGSKSGTSASLAISGLRSEDEADYYCSTWDDALSVRVFGGGTKLTVL

SEQ ID NO: 166 - protein, 110 aa, synthetic construct; identical to SEQ ID NO: 123
  REGION 1..110: note = Description of Artificial Sequence: Synthetic polypeptide

SEQ ID NO: 167 - protein, 110 aa, synthetic construct; identical to SEQ ID NO: 123
  REGION 1..110: note = Description of Artificial Sequence: Synthetic polypeptide

SEQ ID NO: 168 - protein, 110 aa, synthetic construct
  REGION 1..110: note = Description of Artificial Sequence: Synthetic polypeptide
QSVLTQPPSASGTPGQRVTISCSGSSSNIGSSSVSWYQQLPGTAPKLLIYKNSLRPQGVPDRFSGSKSGTSASLAISGLRSEDEADYYCSTWDDSLSVRVFGGGTKLTVL

SEQ ID NO: 169 - protein, 10 aa, synthetic construct
  REGION 1..10: note = Description of Artificial Sequence: Synthetic peptide
GFTFSKAWMT

SEQ ID NO: 170 - protein, 10 aa, synthetic construct
  REGION 1..10: note = Description of Artificial Sequence: Synthetic peptide
GFTFSKAWMT

SEQ ID NO: 171 - protein, 10 aa, synthetic construct
  REGION 1..10: note = Description of Artificial Sequence: Synthetic peptide
GFTFSKAWMT

SEQ ID NO: 172 - protein, 10 aa, synthetic construct
  REGION 1..10: note = Description of Artificial Sequence: Synthetic peptide
GFTFSKAWMS

SEQ ID NO: 173 - protein, 10 aa, synthetic construct
  REGION 1..10: note = Description of Artificial Sequence: Synthetic peptide
GYTFSKAWMS

SEQ ID NO: 174 - protein, 10 aa, synthetic construct
  REGION 1..10: note = Description of Artificial Sequence: Synthetic peptide
GFDFSKAWMS

SEQ ID NO: 175 - protein, 10 aa, synthetic construct
  REGION 1..10: note = Description of Artificial Sequence: Synthetic peptide
GFVFSKAWMS

SEQ ID NO: 176 - protein, 10 aa, synthetic construct
  REGION 1..10: note = Description of Artificial Sequence: Synthetic peptide
GFTYSKAWMS

SEQ ID NO: 177 - protein, 10 aa, synthetic construct
  REGION 1..10: note = Description of Artificial Sequence: Synthetic peptide
GFTFAKAWMS

SEQ ID NO: 178 - protein, 10 aa, synthetic construct
  REGION 1..10: note = Description of Artificial Sequence: Synthetic peptide
GFTFSNAWMS

SEQ ID NO: 179 - protein, 10 aa, synthetic construct
  REGION 1..10: note = Description of Artificial Sequence: Synthetic peptide
GFTFSRAWMS

SEQ ID NO: 180 - protein, 10 aa, synthetic construct
  REGION 1..10: note = Description of Artificial Sequence: Synthetic peptide
GFTFSMAWMS

SEQ ID NO: 181 - protein, 10 aa, synthetic construct
  REGION 1..10: note = Description of Artificial Sequence: Synthetic peptide
GFTFSAAWMS

SEQ ID NO: 182 - protein, 10 aa, synthetic construct
  REGION 1..10: note = Description of Artificial Sequence: Synthetic peptide
GFTFSHAWMS

SEQ ID NO: 183 - protein, 10 aa, synthetic construct
  REGION 1..10: note = Description of Artificial Sequence: Synthetic peptide
GFTFSHAWMS

SEQ ID NO: 184 - protein, 10 aa, synthetic construct
  REGION 1..10: note = Description of Artificial Sequence: Synthetic peptide
GFTFSKAYMS

SEQ ID NO: 185 - protein, 10 aa, synthetic construct
  REGION 1..10: note = Description of Artificial Sequence: Synthetic peptide
GFTFSKAWFS

SEQ ID NO: 186 - protein, 10 aa, synthetic construct
  REGION 1..10: note = Description of Artificial Sequence: Synthetic peptide
GFTFSKAWMS

SEQ ID NO: 187 - protein, 10 aa, synthetic construct
  REGION 1..10: note = Description of Artificial Sequence: Synthetic peptide
GFTFSKAWMS

SEQ ID NO: 188 - protein, 10 aa, synthetic construct
  REGION 1..10: note = Description of Artificial Sequence: Synthetic peptide
GFTFSKAWMS

SEQ ID NO: 189 - protein, 10 aa, synthetic construct
  REGION 1..10: note = Description of Artificial Sequence: Synthetic peptide
GFTFSKAWMS

SEQ ID NO: 190 - protein, 10 aa, synthetic construct
  REGION 1..10: note = Description of Artificial Sequence: Synthetic peptide
GFTFSKAWMS

SEQ ID NO: 191 - protein, 10 aa, synthetic construct
  REGION 1..10: note = Description of Artificial Sequence: Synthetic peptide
GFTFSKAWMS

SEQ ID NO: 192 - protein, 10 aa, synthetic construct
  REGION 1..10: note = Description of Artificial Sequence: Synthetic peptide
GFTFSKAWMS

SEQ ID NO: 193 - protein, 10 aa, synthetic construct
  REGION 1..10: note = Description of Artificial Sequence: Synthetic peptide
GFTFSKAWMS

SEQ ID NO: 194 - protein, 10 aa, synthetic construct
  REGION 1..10: note = Description of Artificial Sequence: Synthetic peptide
GFTFSKAWMS

SEQ ID NO: 195 - protein, 10 aa, synthetic construct
  REGION 1..10: note = Description of Artificial Sequence: Synthetic peptide
GFTFSKAWMS

SEQ ID NO: 196 - protein, 10 aa, synthetic construct
  REGION 1..10: note = Description of Artificial Sequence: Synthetic peptide
GFTFSKAWMS

SEQ ID NO: 197 - protein, 10 aa, synthetic construct
  REGION 1..10: note = Description of Artificial Sequence: Synthetic peptide
GFTFSKAWMS

SEQ ID NO: 198 - protein, 10 aa, synthetic construct
  REGION 1..10: note = Description of Artificial Sequence: Synthetic peptide
GFTFSKAWMS

SEQ ID NO: 199 - protein, 10 aa, synthetic construct
  REGION 1..10: note = Description of Artificial Sequence: Synthetic peptide
GFTFSKAWMS

SEQ ID NO: 200 - protein, 10 aa, synthetic construct
  REGION 1..10: note = Description of Artificial Sequence: Synthetic peptide
GFTFSKAWMS

SEQ ID NO: 201 - protein, 10 aa, synthetic construct
  REGION 1..10: note = Description of Artificial Sequence: Synthetic peptide
GFTFSKAWMS

SEQ ID NO: 202 - protein, 10 aa, synthetic construct
  REGION 1..10: note = Description of Artificial Sequence: Synthetic peptide
GFTFSKAWMS

SEQ ID NO: 203 - protein, 10 aa, synthetic construct
  REGION 1..10: note = Description of Artificial Sequence: Synthetic peptide
GFTFSKAWMS

SEQ ID NO: 204 - protein, 10 aa, synthetic construct
  REGION 1..10: note = Description of Artificial Sequence: Synthetic peptide
GFTFSKAWMS

SEQ ID NO: 205 - protein, 10 aa, synthetic construct
  REGION 1..10: note = Description of Artificial Sequence: Synthetic peptide
GFTFSKAWMS

SEQ ID NO: 206 - protein, 10 aa, synthetic construct
  REGION 1..10: note = Description of Artificial Sequence: Synthetic peptide
GFTFSKAWMS

SEQ ID NO: 207 - protein, 10 aa, synthetic construct
  REGION 1..10: note = Description of Artificial Sequence: Synthetic peptide
GFTFSKAWMS

SEQ ID NO: 208 - protein, 10 aa, synthetic construct
  REGION 1..10: note = Description of Artificial Sequence: Synthetic peptide
GFTFSKAWMS

SEQ ID NO: 209 - protein, 10 aa, synthetic construct
  REGION 1..10: note = Description of Artificial Sequence: Synthetic peptide
GFTFSKAWMS

SEQ ID NO: 210 - protein, 10 aa, synthetic construct
  REGION 1..10: note = Description of Artificial Sequence: Synthetic peptide
GFTFSKAWMS

SEQ ID NO: 211 - protein, 10 aa, synthetic construct
  REGION 1..10: note = Description of Artificial Sequence: Synthetic peptide
GFTFSKAWMS

SEQ ID NO: 212 - protein, 10 aa, synthetic construct
  REGION 1..10: note = Description of Artificial Sequence: Synthetic peptide
GFTFSKAWMS

SEQ ID NO: 213 - protein, 10 aa, synthetic construct
  REGION 1..10: note = Description of Artificial Sequence: Synthetic peptide
GFTFSKAWMS

SEQ ID NO: 214 - protein, 10 aa, synthetic construct
  REGION 1..10: note = Description of Artificial Sequence: Synthetic peptide
GFTFSKAWMS

SEQ ID NO: 215 - protein, 10 aa, synthetic construct
  REGION 1..10: note = Description of Artificial Sequence: Synthetic peptide
GFTFSKAWMS

SEQ ID NO: 216 - protein, 10 aa, synthetic construct
  REGION 1..10: note = Description of Artificial Sequence: Synthetic peptide
GFTFSKAWMS

SEQ ID NO: 217 - protein, 10 aa, synthetic construct
  REGION 1..10: note = Description of Artificial Sequence: Synthetic peptide
GFTFSKAWMS

SEQ ID NO: 218 - protein, 10 aa, synthetic construct
  REGION 1..10: note = Description of Artificial Sequence: Synthetic peptide
GFTFSKAWMS

SEQ ID NO: 219 - protein, 10 aa, synthetic construct
  REGION 1..10: note = Description of Artificial Sequence: Synthetic peptide
GFTFSKAWMS

SEQ ID NO: 220 - protein, 10 aa, synthetic construct
  REGION 1..10: note = Description of Artificial Sequence: Synthetic peptide
GFTFSKAWMS

SEQ ID NO: 221 - protein, 10 aa, synthetic construct
  REGION 1..10: note = Description of Artificial Sequence: Synthetic peptide
GFTFSKAWMS

SEQ ID NO: 222 - protein, 10 aa, synthetic construct
  REGION 1..10: note = Description of Artificial Sequence: Synthetic peptide
GFTFSKAWMS

SEQ ID NO: 223 - protein, 10 aa, synthetic construct
  REGION 1..10: note = Description of Artificial Sequence: Synthetic peptide
GFTFSKAWMS

SEQ ID NO: 224 - protein, 10 aa, synthetic construct
  REGION 1..10: note = Description of Artificial Sequence: Synthetic peptide
GFTFSKAWMS

SEQ ID NO: 225 - protein, 10 aa, synthetic construct
  REGION 1..10: note = Description of Artificial Sequence: Synthetic peptide
GFTFSKAWMS

SEQ ID NO: 226 - protein, 10 aa, synthetic construct
  REGION 1..10: note = Description of Artificial Sequence: Synthetic peptide
GFTFSKAWMS

SEQ ID NO: 227 - protein, 10 aa, synthetic construct
  REGION 1..10: note = Description of Artificial Sequence: Synthetic peptide
GFTFSKAWMS

SEQ ID NO: 228 - protein, 10 aa, synthetic construct
  REGION 1..10: note = Description of Artificial Sequence: Synthetic peptide
GFTFSKAWMS

SEQ ID NO: 229 - protein, 10 aa, synthetic construct
  REGION 1..10: note = Description of Artificial Sequence: Synthetic peptide
GFTFSKAWMS

SEQ ID NO: 230 - protein, 10 aa, synthetic construct
  REGION 1..10: note = Description of Artificial Sequence: Synthetic peptide
GFTFSKAWMS

SEQ ID NO: 231 - protein, 10 aa, synthetic construct
  REGION 1..10: note = Description of Artificial Sequence: Synthetic peptide
GFTFSKAWMS

SEQ ID NO: 232 - protein, 10 aa, synthetic construct
  REGION 1..10: note = Description of Artificial Sequence: Synthetic peptide
GFTFSKAWMS

SEQ ID NO: 233 - protein, 10 aa, synthetic construct
  REGION 1..10: note = Description of Artificial Sequence: Synthetic peptide
GFTFSKAWMS

SEQ ID NO: 234 - protein, 10 aa, synthetic construct
  REGION 1..10: note = Description of Artificial Sequence: Synthetic peptide
GFTFSKAWMS

SEQ ID NO: 235 - protein, 10 aa, synthetic construct
  REGION 1..10: note = Description of Artificial Sequence: Synthetic peptide
GFTFSKAWMS

SEQ ID NO: 236 - protein, 10 aa, synthetic construct
  REGION 1..10: note = Description of Artificial Sequence: Synthetic peptide
GFTFSKAWMS

SEQ ID NO: 237 - protein, 10 aa, synthetic construct
  REGION 1..10: note = Description of Artificial Sequence: Synthetic peptide
GFTFSKAWMS

SEQ ID NO: 238 - protein, 10 aa, synthetic construct
  REGION 1..10: note = Description of Artificial Sequence: Synthetic peptide
GFTFSKAWMS

SEQ ID NO: 239 - protein, 10 aa, synthetic construct
  REGION 1..10: note = Description of Artificial Sequence: Synthetic peptide
GFTFSKAWMS

SEQ ID NO: 240 - protein, 10 aa, synthetic construct
  REGION 1..10: note = Description of Artificial Sequence: Synthetic peptide
GFTFSKAWMS

SEQ ID NO: 241 - protein, 10 aa, synthetic construct
  REGION 1..10: note = Description of Artificial Sequence: Synthetic peptide
GFTFSKAWMS

SEQ ID NO: 242 - protein, 10 aa, synthetic construct
  REGION 1..10: note = Description of Artificial Sequence: Synthetic peptide
GFTFSKAWMS

SEQ ID NO: 243 - protein, 10 aa, synthetic construct
  REGION 1..10: note = Description of Artificial Sequence: Synthetic peptide
GFTFSKAWMS

SEQ ID NO: 244 - protein, 10 aa, synthetic construct
  REGION 1..10: note = Description of Artificial Sequence: Synthetic peptide
GFTFSKAWMS

SEQ ID NO: 245 - protein, 10 aa, synthetic construct
  REGION 1..10: note = Description of Artificial Sequence: Synthetic peptide
GFTFSKAWMS

SEQ ID NO: 246 - protein, 10 aa, synthetic construct
  REGION 1..10: note = Description of Artificial Sequence: Synthetic peptide
GFTFSKAWMS

SEQ ID NO: 247 - protein, 10 aa, synthetic construct
  REGION 1..10: note = Description of Artificial Sequence: Synthetic peptide
GFTFSKAWMS

SEQ ID NO: 248 - protein, 10 aa, synthetic construct
  REGION 1..10: note = Description of Artificial Sequence: Synthetic peptide
GFTFSKAWMS

SEQ ID NO: 249 - protein, 10 aa, synthetic construct
  REGION 1..10: note = Description of Artificial Sequence: Synthetic peptide
GFTFSKAWMS

SEQ ID NO: 250 - protein, 10 aa, synthetic construct
  REGION 1..10: note = Description of Artificial Sequence: Synthetic peptide
GFTFSKAWMS

SEQ ID NO: 251 - protein, 10 aa, synthetic construct
  REGION 1..10: note = Description of Artificial Sequence: Synthetic peptide
GFTFSKAWMS

SEQ ID NO: 252 - protein, 10 aa, synthetic construct
  REGION 1..10: note = Description of Artificial Sequence: Synthetic peptide
GFTFSKAWMS

SEQ ID NO: 253 - protein, 10 aa, synthetic construct
  REGION 1..10: note = Description of Artificial Sequence: Synthetic peptide
GFTFSKAWMS

SEQ ID NO: 254 - protein, 10 aa, synthetic construct
  REGION 1..10: note = Description of Artificial Sequence: Synthetic peptide
GFTFSKAWMS

SEQ ID NO: 255 - protein, 10 aa, synthetic construct
  REGION 1..10: note = Description of Artificial Sequence: Synthetic peptide
GFDFSKAWMS

SEQ ID NO: 256 - protein, 10 aa, synthetic construct
  REGION 1..10: note = Description of Artificial Sequence: Synthetic peptide
GFTFAKAWMS

SEQ ID NO: 257 - protein, 10 aa, synthetic construct
  REGION 1..10: note = Description of Artificial Sequence: Synthetic peptide
GFDASKAWFT

SEQ ID NO: 258 - protein, 10 aa, synthetic construct
  REGION 1..10: note = Description of Artificial Sequence: Synthetic peptide
GFTFSKAWMS

SEQ ID NO: 259 - protein, 10 aa, synthetic construct
  REGION 1..10: note = Description of Artificial Sequence: Synthetic peptide
GFTFSKAWMS

SEQ ID NO: 260 - protein, 10 aa, synthetic construct
  REGION 1..10: note = Description of Artificial Sequence: Synthetic peptide
GFTFSKAWMS

SEQ ID NO: 261 - protein, 10 aa, synthetic construct
  REGION 1..10: note = Description of Artificial Sequence: Synthetic peptide
GFTFSKAWMS

SEQ ID NO: 262 - protein, 10 aa, synthetic construct
  REGION 1..10: note = Description of Artificial Sequence: Synthetic peptide
GFTFSKAWMS

SEQ ID NO: 263 - protein, 10 aa, synthetic construct
  REGION 1..10: note = Description of Artificial Sequence: Synthetic peptide
GFTFSKAWMS

SEQ ID NO: 264 - protein, 10 aa, synthetic construct
  REGION 1..10: note = Description of Artificial Sequence: Synthetic peptide
GFTFSKAWMS

SEQ ID NO: 265 - protein, 10 aa, synthetic construct
  REGION 1..10: note = Description of Artificial Sequence: Synthetic peptide
GFTFSKAWMS

SEQ ID NO: 266 - protein, 10 aa, synthetic construct
  REGION 1..10: note = Description of Artificial Sequence: Synthetic peptide
GFTFSKAWMS

SEQ ID NO: 267 - protein, 10 aa, synthetic construct
  REGION 1..10: note = Description of Artificial Sequence: Synthetic peptide
GFTFSKAWMS

SEQ ID NO: 268 - protein, 10 aa, synthetic construct
  REGION 1..10: note = Description of Artificial Sequence: Synthetic peptide
GFTFSKAWMS

SEQ ID NO: 269 - protein, 10 aa, synthetic construct
  REGION 1..10: note = Description of Artificial Sequence: Synthetic peptide
GFTFSKAWMS

SEQ ID NO: 270 - protein, 10 aa, synthetic construct
  REGION 1..10: note = Description of Artificial Sequence: Synthetic peptide
GFTFSKAWMS

SEQ ID NO: 271 - protein, 10 aa, synthetic construct
  REGION 1..10: note = Description of Artificial Sequence: Synthetic peptide
GFTFSKAWMS

SEQ ID NO: 272 - protein, 10 aa, synthetic construct
  REGION 1..10: note = Description of Artificial Sequence: Synthetic peptide
GFTFSKAWMS

SEQ ID NO: 273 - protein, 10 aa, synthetic construct
  REGION 1..10: note = Description of Artificial Sequence: Synthetic peptide
GFTFSKAWMS

SEQ ID NO: 274 - protein, 10 aa, synthetic construct
  REGION 1..10: note = Description of Artificial Sequence: Synthetic peptide
GFTFSKAWMS

SEQ ID NO: 275 - protein, 10 aa, synthetic construct
  REGION 1..10: note = Description of Artificial Sequence: Synthetic peptide
GFTFSKAWMS

SEQ ID NO: 276 - protein, 10 aa, synthetic construct
  REGION 1..10: note = Description of Artificial Sequence: Synthetic peptide
GFTFSKAWMS

SEQ ID NO: 277 - protein, 10 aa, synthetic construct
  REGION 1..10: note = Description of Artificial Sequence: Synthetic peptide
GFTFSKAWMS

SEQ ID NO: 278 - protein, 10 aa, synthetic construct
  REGION 1..10: note = Description of Artificial Sequence: Synthetic peptide
GFTFSKAWMS

SEQ ID NO: 279 - protein, 10 aa, synthetic construct
  REGION 1..10: note = Description of Artificial Sequence: Synthetic peptide
GFTFSKAWMS

SEQ ID NO: 280 - protein, 10 aa, synthetic construct
  REGION 1..10: note = Description of Artificial Sequence: Synthetic peptide
GFTFSKAWMS

SEQ ID NO: 281 - protein, 10 aa, synthetic construct
  REGION 1..10: note = Description of Artificial Sequence: Synthetic peptide
GFTFSKAWMS

SEQ ID NO: 282 - protein, 10 aa, synthetic construct
  REGION 1..10: note = Description of Artificial Sequence: Synthetic peptide
GFTFSKAWMS

SEQ ID NO: 283 - protein, 10 aa, synthetic construct
  REGION 1..10: note = Description of Artificial Sequence: Synthetic peptide
GFTFSKAWMS

SEQ ID NO: 284 - protein, 10 aa, synthetic construct
  REGION 1..10: note = Description of Artificial Sequence: Synthetic peptide
GFTFSKAWMS

SEQ ID NO: 285 - protein, 10 aa, synthetic construct
  REGION 1..10: note = Description of Artificial Sequence: Synthetic peptide
GFTFSKAWMS

SEQ ID NO: 286 - protein, 10 aa, synthetic construct
  REGION 1..10: note = Description of Artificial Sequence: Synthetic peptide
GFTFSKAWMS

SEQ ID NO: 287 - protein, 10 aa, synthetic construct
  REGION 1..10: note = Description of Artificial Sequence: Synthetic peptide
GFTFSKAWMS

SEQ ID NO: 288 - protein, 10 aa, synthetic construct
  REGION 1..10: note = Description of Artificial Sequence: Synthetic peptide
GFTFSKAWMS

SEQ ID NO: 289 - protein, 10 aa, synthetic construct
  REGION 1..10: note = Description of Artificial Sequence: Synthetic peptide
GFTFSKAWMS

SEQ ID NO: 290 - protein, 10 aa, synthetic construct
  REGION 1..10: note = Description of Artificial Sequence: Synthetic peptide
GFTFSKAWMS

SEQ ID NO: 291 - protein, 10 aa, synthetic construct
  REGION 1..10: note = Description of Artificial Sequence: Synthetic peptide
GFTFSKAWMS

SEQ ID NO: 292 - protein, 10 aa, synthetic construct
  REGION 1..10: note = Description of Artificial Sequence: Synthetic peptide
GFTFSKAWMS

SEQ ID NO: 293 - protein, 10 aa, synthetic construct
  REGION 1..10: note = Description of Artificial Sequence: Synthetic peptide
GFTFSKAWMS

SEQ ID NO: 294 - protein, 10 aa, synthetic construct
  REGION 1..10: note = Description of Artificial Sequence: Synthetic peptide
GFTFSKAWMS

SEQ ID NO: 295 - protein, 10 aa, synthetic construct
  REGION 1..10: note = Description of Artificial Sequence: Synthetic peptide
GFTFSKAWMS

SEQ ID NO: 296 - protein, 10 aa, synthetic construct
  REGION 1..10: note = Description of Artificial Sequence: Synthetic peptide
GFTFSKAWMS

SEQ ID NO: 297 - protein, 10 aa, synthetic construct
  REGION 1..10: note = Description of Artificial Sequence: Synthetic peptide
GFTFSKAWMS

SEQ ID NO: 298 - protein, 10 aa, synthetic construct
  REGION 1..10: note = Description of Artificial Sequence: Synthetic peptide
GFTFSKAWMS

SEQ ID NO: 299 - protein, 10 aa, synthetic construct
  REGION 1..10: note = Description of Artificial Sequence: Synthetic peptide
GFTFSKAWMS

SEQ ID NO: 300 - protein, 10 aa, synthetic construct
  REGION 1..10: note = Description of Artificial Sequence: Synthetic peptide
GFTFSKAWMS

SEQ ID NO: 301 - protein, 10 aa, synthetic construct
  REGION 1..10: note = Description of Artificial Sequence: Synthetic peptide
GFTFSKAWMS

SEQ ID NO: 302 - protein, 10 aa, synthetic construct
  REGION 1..10: note = Description of Artificial Sequence: Synthetic peptide
GFTFSKAWMS

SEQ ID NO: 303 - protein, 10 aa, synthetic construct
  REGION 1..10: note = Description of Artificial Sequence: Synthetic peptide
GFTFSKAWMS

SEQ ID NO: 304 - protein, 10 aa, synthetic construct
  REGION 1..10: note = Description of Artificial Sequence: Synthetic peptide
GFTFSKAWMS

SEQ ID NO: 305 - protein, 10 aa, synthetic construct
  REGION 1..10: note = Description of Artificial Sequence: Synthetic peptide
GFTFSKAWMS

SEQ ID NO: 306 - protein, 10 aa, synthetic construct
  REGION 1..10: note = Description of Artificial Sequence: Synthetic peptide
GFTFSKAWMS

SEQ ID NO: 307 - protein, 10 aa, synthetic construct
  REGION 1..10: note = Description of Artificial Sequence: Synthetic peptide
GFTFSKAWMS

SEQ ID NO: 308 - protein, 10 aa, synthetic construct
  REGION 1..10: note = Description of Artificial Sequence: Synthetic peptide
GFTFSKAWMS

SEQ ID NO: 309 - protein, 10 aa, synthetic construct
  REGION 1..10: note = Description of Artificial Sequence: Synthetic peptide
GFTFSKAWYS

SEQ ID NO: 310 - protein, 10 aa, synthetic construct
  REGION 1..10: note = Description of Artificial Sequence: Synthetic peptide
GFTFSKAWMS

SEQ ID NO: 311 - protein, 10 aa, synthetic construct
  REGION 1..10: note = Description of Artificial Sequence: Synthetic peptide
GFTFSKAWMS

SEQ ID NO: 312 - protein, 10 aa, synthetic construct
  REGION 1..10: note = Description of Artificial Sequence: Synthetic peptide
GFTFSKAWMS

SEQ ID NO: 313 - protein, 10 aa, synthetic construct
  REGION 1..10: note = Description of Artificial Sequence: Synthetic peptide
GFTFSKAWMS

SEQ ID NO: 314 - protein, 10 aa, synthetic construct
  REGION 1..10: note = Description of Artificial Sequence: Synthetic peptide
GFTFSKAWMS

SEQ ID NO: 315 - protein, 10 aa, synthetic construct
  REGION 1..10: note = Description of Artificial Sequence: Synthetic peptide
GFTFSKAWMS

SEQ ID NO: 316 - protein, 10 aa, synthetic construct
  REGION 1..10: note = Description of Artificial Sequence: Synthetic peptide
GFTFSKAWMS

SEQ ID NO: 317 - protein, 10 aa, synthetic construct
  REGION 1..10: note = Description of Artificial Sequence: Synthetic peptide
GFTFSKAWMS

SEQ ID NO: 318 - protein, 10 aa, synthetic construct
  REGION 1..10: note = Description of Artificial Sequence: Synthetic peptide
GFTFSKAWMS

SEQ ID NO: 319 - protein, 10 aa, synthetic construct
  REGION 1..10: note = Description of Artificial Sequence: Synthetic peptide
GFTFSKAWMS

SEQ ID NO: 320 - protein, 10 aa, synthetic construct
  REGION 1..10: note = Description of Artificial Sequence: Synthetic peptide
GFTFSKAWMS

SEQ ID NO: 321 - protein, 10 aa, synthetic construct
  REGION 1..10: note = Description of Artificial Sequence: Synthetic peptide
GFTFSKAWMS

SEQ ID NO: 322 - protein, 10 aa, synthetic construct
  REGION 1..10: note = Description of Artificial Sequence: Synthetic peptide
GFTFSKAWMS

SEQ ID NO: 323 - protein, 10 aa, synthetic construct
  REGION 1..10: note = Description of Artificial Sequence: Synthetic peptide
GFTFSKAWMS

SEQ ID NO: 324 - protein, 10 aa, synthetic construct
  REGION 1..10: note = Description of Artificial Sequence: Synthetic peptide
GFTFSKAWMS

SEQ ID NO: 325 - protein, 10 aa, synthetic construct
  REGION 1..10: note = Description of Artificial Sequence: Synthetic peptide
GFTFSKAWMS

SEQ ID NO: 326 - protein, 10 aa, synthetic construct
  REGION 1..10: note = Description of Artificial Sequence: Synthetic peptide
GFTFSKAWMS

SEQ ID NO: 327 - protein, 10 aa, synthetic construct
  REGION 1..10: note = Description of Artificial Sequence: Synthetic peptide
GFTFSKAWMS

SEQ ID NO: 328 - protein, 10 aa, synthetic construct
  REGION 1..10: note = Description of Artificial Sequence: Synthetic peptide
GFTFSKAWMS

SEQ ID NO: 329 - protein, 10 aa, synthetic construct
  REGION 1..10: note = Description of Artificial Sequence: Synthetic peptide
GFTFSKAWMS

SEQ ID NO: 330 - protein, 10 aa, synthetic construct
  REGION 1..10: note = Description of Artificial Sequence: Synthetic peptide
GFTFSKAWMS

SEQ ID NO: 331 - protein, 10 aa, synthetic construct
  REGION 1..10: note = Description of Artificial Sequence: Synthetic peptide
GFTFSKAWMS

SEQ ID NO: 332 - protein, 10 aa, synthetic construct
  REGION 1..10: note = Description of Artificial Sequence: Synthetic peptide
GFTFSKAWMS

SEQ ID NO: 333 - protein, 10 aa, synthetic construct
  REGION 1..10: note = Description of Artificial Sequence: Synthetic peptide
GFTFSKAWMS

SEQ ID NO: 334 - protein, 10 aa, synthetic construct
  REGION 1..10: note = Description of Artificial Sequence: Synthetic peptide
GFTFSKAWMS

SEQ ID NO: 335 - protein, 10 aa, synthetic construct
  REGION 1..10: note = Description of Artificial Sequence: Synthetic peptide
GFTFSKAWMS

SEQ ID NO: 336 - protein, 10 aa, synthetic construct
  REGION 1..10: note = Description of Artificial Sequence: Synthetic peptide
GFTFSKAWMS

SEQ ID NO: 337 - protein, 10 aa, synthetic construct
  REGION 1..10: note = Description of Artificial Sequence: Synthetic peptide
GFTFSKAWMS

SEQ ID NO: 338 - protein, 10 aa, synthetic construct
  REGION 1..10: note = Description of Artificial Sequence: Synthetic peptide
GFTFSKAWMS

SEQ ID NO: 339 - protein, 10 aa, synthetic construct
  REGION 1..10: note = Description of Artificial Sequence: Synthetic peptide
GFTFSKAWMS

SEQ ID NO: 340 - protein, 10 aa, synthetic construct
  REGION 1..10: note = Description of Artificial Sequence: Synthetic peptide
GFTFSKAWMS

SEQ ID NO: 341 - protein, 10 aa, synthetic construct
  REGION 1..10: note = Description of Artificial Sequence: Synthetic peptide
GFTFSKAWMS

SEQ ID NO: 342 - protein, 10 aa, synthetic construct
  REGION 1..10: note = Description of Artificial Sequence: Synthetic peptide
GFTFSKAWMS

SEQ ID NO: 343 - protein, 10 aa, synthetic construct
  REGION 1..10: note = Description of Artificial Sequence: Synthetic peptide
GFTFSKAWMS

SEQ ID NO: 344 - protein, 10 aa, synthetic construct
  REGION 1..10: note = Description of Artificial Sequence: Synthetic peptide
GFTFSKAWMS

SEQ ID NO: 345 - protein, 10 aa, synthetic construct
  REGION 1..10: note = Description of Artificial Sequence: Synthetic peptide
GFTFSKAWMS

SEQ ID NO: 346 - protein, 10 aa, synthetic construct
  REGION 1..10: note = Description of Artificial Sequence: Synthetic peptide
GFTFAKAWMS

SEQ ID NO: 347 - protein, 10 aa, synthetic construct
  REGION 1..10: note = Description of Artificial Sequence: Synthetic peptide
GFTYAKAWMS

SEQ ID NO: 348 - protein, 10 aa, synthetic construct
  REGION 1..10: note = Description of Artificial Sequence: Synthetic peptide
GFDASKAWFT

SEQ ID NO: 349 - protein, 10 aa, synthetic construct
  REGION 1..10: note = Description of Artificial Sequence: Synthetic peptide
GFDASKAWFT

SEQ ID NO: 350 - protein, 10 aa, synthetic construct
  REGION 1..10: note = Description of Artificial Sequence: Synthetic peptide
GFDASKAWFT

SEQ ID NO: 351 - protein, 10 aa, synthetic construct
  REGION 1..10: note = Description of Artificial Sequence: Synthetic peptide
GFDASKAWFT

SEQ ID NO: 352 - protein, 10 aa, synthetic construct
  REGION 1..10: note = Description of Artificial Sequence: Synthetic peptide
GFTFSKAWMS

SEQ ID NO: 353 - protein, 10 aa, synthetic construct
  REGION 1..10: note = Description of Artificial Sequence: Synthetic peptide
GFTFSKAWMS

SEQ ID NO: 354 - protein, 10 aa, synthetic construct
  REGION 1..10: note = Description of Artificial Sequence: Synthetic peptide
GFTFSKAWMS

SEQ ID NO: 355 - protein, 10 aa, synthetic construct
  REGION 1..10: note = Description of Artificial Sequence: Synthetic peptide
GFTFSKAWMS

SEQ ID NO: 356 - protein, 10 aa, synthetic construct
  REGION 1..10: note = Description of Artificial Sequence: Synthetic peptide
GFTFSKAWMS

SEQ ID NO: 357 - protein, 10 aa, synthetic construct
  REGION 1..10: note = Description of Artificial Sequence: Synthetic peptide
GFTFSKAWMS

SEQ ID NO: 358 - protein, 10 aa, synthetic construct
  REGION 1..10: note = Description of Artificial Sequence: Synthetic peptide
GFVYSKAWMS

SEQ ID NO: 359 - protein, 10 aa, synthetic construct
  REGION 1..10: note = Description of Artificial Sequence: Synthetic peptide
GFVFSKAWMS

SEQ ID NO: 360 - protein, 10 aa, synthetic construct
  REGION 1..10: note = Description of Artificial Sequence: Synthetic peptide
GFTFAKAWMS

SEQ ID NO: 361 - protein, 10 aa, synthetic construct
  REGION 1..10: note = Description of Artificial Sequence: Synthetic peptide
GFTYAKAWFT

SEQ ID NO: 362 - protein, 10 aa, synthetic construct
  REGION 1..10: note = Description of Artificial Sequence: Synthetic peptide
GFTFSKAWMS

SEQ ID NO: 363 - protein, 19 aa, synthetic construct
  REGION 1..19: note = Description of Artificial Sequence: Synthetic peptide
RIKSVTEGETTDYAAPVKG

SEQ ID NO: 364 - protein, 19 aa, synthetic construct
  REGION 1..19: note = Description of Artificial Sequence: Synthetic peptide
RIKSVTEGETTDYAAPVKG

SEQ ID NO: 365 - protein, 19 aa, synthetic construct
  REGION 1..19: note = Description of Artificial Sequence: Synthetic peptide
RIKSVTDGETTDYAAPVKG

SEQ ID NO: 366 - protein, 19 aa, synthetic construct
  REGION 1..19: note = Description of Artificial Sequence: Synthetic peptide
RIKSVTDGETTDYAAPVKG

SEQ ID NO: 367 - protein, 19 aa, synthetic construct
  REGION 1..19: note = Description of Artificial Sequence: Synthetic peptide
RIKSVTDGETTDYAAPVKG

SEQ ID NO: 368 - protein, 19 aa, synthetic construct
  REGION 1..19: note = Description of Artificial Sequence: Synthetic peptide
RIKSVTDGETTDYAAPVKG

SEQ ID NO: 369 - protein, 19 aa, synthetic construct
  REGION 1..19: note = Description of Artificial Sequence: Synthetic peptide
RIKSVTDGETTDYAAPVKG

SEQ ID NO: 370 - protein, 19 aa, synthetic construct
  REGION 1..19: note = Description of Artificial Sequence: Synthetic peptide
RIKSVTDGETTDYAAPVKG

SEQ ID NO: 371 - protein, 19 aa, synthetic construct
  REGION 1..19: note = Description of Artificial Sequence: Synthetic peptide
RIKSVTDGETTDYAAPVKG

SEQ ID NO: 372 - protein, 19 aa, synthetic construct
  REGION 1..19: note = Description of Artificial Sequence: Synthetic peptide
RIKSVTDGETTDYAAPVKG

SEQ ID NO: 373 - protein, 19 aa, synthetic construct
  REGION 1..19: note = Description of Artificial Sequence: Synthetic peptide
RIKSVTDGETTDYAAPVKG

SEQ ID NO: 374 - protein, 19 aa, synthetic construct
  REGION 1..19: note = Description of Artificial Sequence: Synthetic peptide
RIKSVTDGETTDYAAPVKG

SEQ ID NO: 375 - protein, 19 aa, synthetic construct
  REGION 1..19: note = Description of Artificial Sequence: Synthetic peptide
RIKSVTDGETTDYAAPVKG

SEQ ID NO: 376 - protein, 19 aa, synthetic construct
  REGION 1..19: note = Description of Artificial Sequence: Synthetic peptide
RIKSVTDGETTDYAAPVKG

SEQ ID NO: 377 - protein, 19 aa, synthetic construct
  REGION 1..19: note = Description of Artificial Sequence: Synthetic peptide
RIKSVTDGETTDYAAPVKG

SEQ ID NO: 378 - protein, 19 aa, synthetic construct
  REGION 1..19: note = Description of Artificial Sequence: Synthetic peptide
RIKSVTDGETTDYAAPVKG

SEQ ID NO: 379 - protein, 19 aa, synthetic construct
  REGION 1..19: note = Description of Artificial Sequence: Synthetic peptide
RIKSVTDGETTDYAAPVKG

SEQ ID NO: 380 - protein, 19 aa, synthetic construct
  REGION 1..19: note = Description of Artificial Sequence: Synthetic peptide
RIQSVTDGETTDYAAPVKG

SEQ ID NO: 381 - protein, 19 aa, synthetic construct
  REGION 1..19: note = Description of Artificial Sequence: Synthetic peptide
RIKAVTDGETTDYAAPVKG

SEQ ID NO: 382 - protein, 19 aa, synthetic construct
  REGION 1..19: note = Description of Artificial Sequence: Synthetic peptide
RIKSATDGETTDYAAPVKG

SEQ ID NO: 383 - protein, 19 aa, synthetic construct
  REGION 1..19: note = Description of Artificial Sequence: Synthetic peptide
RIKSNTDGETTDYAAPVKG

SEQ ID NO: 384 - protein, 19 aa, synthetic construct
  REGION 1..19: note = Description of Artificial Sequence: Synthetic peptide
RIKSVHDGETTDYAAPVKG

SEQ ID NO: 385 - protein, 19 aa, synthetic construct
  REGION 1..19: note = Description of Artificial Sequence: Synthetic peptide
RIKSVDDGETTDYAAPVKG

SEQ ID NO: 386 - protein, 19 aa, synthetic construct
  REGION 1..19: note = Description of Artificial Sequence: Synthetic peptide
RIKSVQDGETTDYAAPVKG

SEQ ID NO: 387 - protein, 19 aa, synthetic construct
  REGION 1..19: note = Description of Artificial Sequence: Synthetic peptide
RIKSVTNGETTDYAAPVKG

SEQ ID NO: 388 - protein, 19 aa, synthetic construct
  REGION 1..19: note = Description of Artificial Sequence: Synthetic peptide
RIKSVTDAETTDYAAPVKG

SEQ ID NO: 389 - protein, 19 aa, synthetic construct
  REGION 1..19: note = Description of Artificial Sequence: Synthetic peptide
RIKSVTDGQTTDYAAPVKG

SEQ ID NO: 390 - protein, 19 aa, synthetic construct
  REGION 1..19: note = Description of Artificial Sequence: Synthetic peptide
RIKSVTDGHTTDYAAPVKG

SEQ ID NO: 391 - protein, 19 aa, synthetic construct
  REGION 1..19: note = Description of Artificial Sequence: Synthetic peptide
RIKSVTDGEQTDYAAPVKG

SEQ ID NO: 392 - protein, 19 aa, synthetic construct
  REGION 1..19: note = Description of Artificial Sequence: Synthetic peptide
RIKSVTDGEATDYAAPVKG

SEQ ID NO: 393 - protein, 19 aa, synthetic construct
  REGION 1..19: note = Description of Artificial Sequence: Synthetic peptide
RIKSVTDGETTDYASPVKG

SEQ ID NO: 394 - protein, 19 aa, synthetic construct
  REGION 1..19: note = Description of Artificial Sequence: Synthetic peptide
RIKSVTDGETTDYAAPVQG

SEQ ID NO: 395 - protein, 19 aa, synthetic construct
  REGION 1..19: note = Description of Artificial Sequence: Synthetic peptide
RIKSVTDGETTDYAAPVKG

SEQ ID NO: 396 - protein, 19 aa, synthetic construct
  REGION 1..19: note = Description of Artificial Sequence: Synthetic peptide
RIKSVTDGETTDYAAPVKG

SEQ ID NO: 397 - protein, 19 aa, synthetic construct
  REGION 1..19: note = Description of Artificial Sequence: Synthetic peptide
RIKSVTDGETTDYAAPVKG

SEQ ID NO: 398 - protein, 19 aa, synthetic construct
  REGION 1..19: note = Description of Artificial Sequence: Synthetic peptide
RIKSVTDGETTDYAAPVKG

SEQ ID NO: 399 - protein, 19 aa, synthetic construct
  REGION 1..19: note = Description of Artificial Sequence: Synthetic peptide
RIKSVTDGETTDYAAPVKG

SEQ ID NO: 400 - protein, 19 aa, synthetic construct
  REGION 1..19: note = Description of Artificial Sequence: Synthetic peptide
RIKSVTDGETTDYAAPVKG

SEQ ID NO: 401 - protein, 19 aa, synthetic construct
  REGION 1..19: note = Description of Artificial Sequence: Synthetic peptide
RIKSVTDGETTDYAAPVKG

SEQ ID NO: 402 - protein, 19 aa, synthetic construct
  REGION 1..19: note = Description of Artificial Sequence: Synthetic peptide
RIKSVTDGETTDYAAPVKG

SEQ ID NO: 403 - protein, 19 aa, synthetic construct
  REGION 1..19: note = Description of Artificial Sequence: Synthetic peptide
RIKSVTDGETTDYAAPVKG

SEQ ID NO: 404 - protein, 19 aa, synthetic construct
  REGION 1..19: note = Description of Artificial Sequence: Synthetic peptide
RIKSVTDGETTDYAAPVKG

SEQ ID NO: 405 - protein, 19 aa, synthetic construct
  REGION 1..19: note = Description of Artificial Sequence: Synthetic peptide
RIKSVTDGETTDYAAPVKG

SEQ ID NO: 406 - protein, 19 aa, synthetic construct
  REGION 1..19: note = Description of Artificial Sequence: Synthetic peptide
RIKSVTDGETTDYAAPVKG

SEQ ID NO: 407 - protein, 19 aa, synthetic construct
  REGION 1..19: note = Description of Artificial Sequence: Synthetic peptide
RIKSVTDGETTDYAAPVKG

SEQ ID NO: 408 - protein, 19 aa, synthetic construct
  REGION 1..19: note = Description of Artificial Sequence: Synthetic peptide
RIKSVTDGETTDYAAPVKG

SEQ ID NO: 409 - protein, 19 aa, synthetic construct
  REGION 1..19: note = Description of Artificial Sequence: Synthetic peptide
RIKSVTDGETTDYAAPVKG

SEQ ID NO: 410 - protein, 19 aa, synthetic construct
  REGION 1..19: note = Description of Artificial Sequence: Synthetic peptide
RIKSVTDGETTDYAAPVKG

SEQ ID NO: 411 - protein, 19 aa, synthetic construct
  REGION 1..19: note = Description of Artificial Sequence: Synthetic peptide
RIKSVTDGETTDYAAPVKG

SEQ ID NO: 412 - protein, 19 aa, synthetic construct
  REGION 1..19: note = Description of Artificial Sequence: Synthetic peptide
RIKSVTDGETTDYAAPVKG

SEQ ID NO: 413 - protein, 19 aa, synthetic construct
  REGION 1..19: note = Description of Artificial Sequence: Synthetic peptide
RIKSVTDGETTDYAAPVKG

SEQ ID NO: 414 - protein, 19 aa, synthetic construct
  REGION 1..19: note = Description of Artificial Sequence: Synthetic peptide
RIKSVTDGETTDYAAPVKG

SEQ ID NO: 415 - protein, 19 aa, synthetic construct
  REGION 1..19: note = Description of Artificial Sequence: Synthetic peptide
RIKSVTDGETTDYAAPVKG

SEQ ID NO: 416 - protein, 19 aa, synthetic construct
  REGION 1..19: note = Description of Artificial Sequence: Synthetic peptide
RIKSVTDGETTDYAAPVKG

SEQ ID NO: 417 - protein, 19 aa, synthetic construct
  REGION 1..19: note = Description of Artificial Sequence: Synthetic peptide
RIKSVTDGETTDYAAPVKG

SEQ ID NO: 418 - protein, 19 aa, synthetic construct
  REGION 1..19: note = Description of Artificial Sequence: Synthetic peptide
RIKSVTDGETTDYAAPVKG

SEQ ID NO: 419 - protein, 19 aa, synthetic construct
  REGION 1..19: note = Description of Artificial Sequence: Synthetic peptide
RIKSVTDGETTDYAAPVKG

SEQ ID NO: 420 - protein, 19 aa, synthetic construct
  REGION 1..19: note = Description of Artificial Sequence: Synthetic peptide
RIKSVTDGETTDYAAPVKG

SEQ ID NO: 421 - protein, 19 aa, synthetic construct
  REGION 1..19: note = Description of Artificial Sequence: Synthetic peptide
RIKSVTDGETTDYAAPVKG

SEQ ID NO: 422 - protein, 19 aa, synthetic construct
  REGION 1..19: note = Description of Artificial Sequence: Synthetic peptide
RIKSVTDGETTDYAAPVKG

SEQ ID NO: 423 - protein, 19 aa, synthetic construct
  REGION 1..19: note = Description of Artificial Sequence: Synthetic peptide
RIKSVTDGETTDYAAPVKG

SEQ ID NO: 424 - protein, 19 aa, synthetic construct
  REGION 1..19: note = Description of Artificial Sequence: Synthetic peptide
RIKSVTDGETTDYAAPVKG

SEQ ID NO: 425 - protein, 19 aa, synthetic construct
  REGION 1..19: note = Description of Artificial Sequence: Synthetic peptide
RIKSVTDGETTDYAAPVKG

SEQ ID NO: 426 - protein, 19 aa, synthetic construct
  REGION 1..19: note = Description of Artificial Sequence: Synthetic peptide
RIKSVTDGETTDYAAPVKG

SEQ ID NO: 427 - protein, 19 aa, synthetic construct
  REGION 1..19: note = Description of Artificial Sequence: Synthetic peptide
RIKSVTDGETTDYAAPVKG

SEQ ID NO: 428 - protein, 19 aa, synthetic construct
  REGION 1..19: note = Description of Artificial Sequence: Synthetic peptide
RIKSVTDGETTDYAAPVKG

SEQ ID NO: 429 - protein, 19 aa, synthetic construct
  REGION 1..19: note = Description of Artificial Sequence: Synthetic peptide
RIKSVTDGETTDYAAPVKG

SEQ ID NO: 430 - protein, 19 aa, synthetic construct
  REGION 1..19: note = Description of Artificial Sequence: Synthetic peptide
RIKSVTDGETTDYAAPVKG

SEQ ID NO: 431 - protein, 19 aa, synthetic construct
  REGION 1..19: note = Description of Artificial Sequence: Synthetic peptide
RIKSVTDGETTDYAAPVKG

SEQ ID NO: 432 - protein, 19 aa, synthetic construct
  REGION 1..19: note = Description of Artificial Sequence: Synthetic peptide
RIKSVTDGETTDYAAPVKG

SEQ ID NO: 433 - protein, 19 aa, synthetic construct
  REGION 1..19: note = Description of Artificial Sequence: Synthetic peptide
RIKSVTDGETTDYAAPVKG

SEQ ID NO: 434 - protein, 19 aa, synthetic construct
  REGION 1..19: note = Description of Artificial Sequence: Synthetic peptide
RIKSVTDGETTDYAAPVKG

SEQ ID NO: 435 - protein, 19 aa, synthetic construct
  REGION 1..19: note = Description of Artificial Sequence: Synthetic peptide
RIKSVTDGETTDYAAPVKG

SEQ ID NO: 436 - protein, 19 aa, synthetic construct
  REGION 1..19: note = Description of Artificial Sequence: Synthetic peptide
RIKSVTDGETTDYAAPVKG

SEQ ID NO: 437 - protein, 19 aa, synthetic construct
  REGION 1..19: note = Description of Artificial Sequence: Synthetic peptide
RIKSVTDGETTDYAAPVKG

SEQ ID NO: 438 - protein, 19 aa, synthetic construct
  REGION 1..19: note = Description of Artificial Sequence: Synthetic peptide
RIKSVTDGETTDYAAPVKG

SEQ ID NO: 439 - protein, 19 aa, synthetic construct
  REGION 1..19: note = Description of Artificial Sequence: Synthetic peptide
RIKSVTDGETTDYAAPVKG

SEQ ID NO: 440 - protein, 19 aa, synthetic construct
  REGION 1..19: note = Description of Artificial Sequence: Synthetic peptide
RIKSVTDGETTDYAAPVKG

SEQ ID NO: 441 - protein, 19 aa, synthetic construct
  REGION 1..19: note = Description of Artificial Sequence: Synthetic peptide
RIKSVTDGETTDYAAPVKG

SEQ ID NO: 442 - protein, 19 aa, synthetic construct
  REGION 1..19: note = Description of Artificial Sequence: Synthetic peptide
RIKSVTDGETTDYAAPVKG

SEQ ID NO: 443 - protein, 19 aa, synthetic construct
  REGION 1..19: note = Description of Artificial Sequence: Synthetic peptide
RIKSVTDGETTDYAAPVKG

SEQ ID NO: 444 - protein, 19 aa, synthetic construct
  REGION 1..19: note = Description of Artificial Sequence: Synthetic peptide
RIKSVTDGETTDYAAPVKG

SEQ ID NO: 445 - protein, 19 aa, synthetic construct
  REGION 1..19: note = Description of Artificial Sequence: Synthetic peptide
RIKSVTDGETTDYAAPVKG

SEQ ID NO: 446 - protein, 19 aa, synthetic construct
  REGION 1..19: note = Description of Artificial Sequence: Synthetic peptide
RIKSVTDGETTDYAAPVKG

SEQ ID NO: 447 - protein, 19 aa, synthetic construct
  REGION 1..19: note = Description of Artificial Sequence: Synthetic peptide
RIKSVTDGETTDYAAPVKG

SEQ ID NO: 448 - protein, 19 aa, synthetic construct
  REGION 1..19: note = Description of Artificial Sequence: Synthetic peptide
RIKSVTDGETTDYAAPVKG

SEQ ID NO: 449 - protein, 19 aa, synthetic construct
  REGION 1..19: note = Description of Artificial Sequence: Synthetic peptide
RIKSVTDGQTTDYAAPVKG

SEQ ID NO: 450 - protein, 19 aa, synthetic construct
  REGION 1..19: note = Description of Artificial Sequence: Synthetic peptide
RIKSVTDGETTDYAAPVKG

SEQ ID NO: 451 - protein, 19 aa, synthetic construct
  REGION 1..19: note = Description of Artificial Sequence: Synthetic peptide
RIKSVTDGETTDYAAPVKG

SEQ ID NO: 452 - protein, 19 aa, synthetic construct
  REGION 1..19: note = Description of Artificial Sequence: Synthetic peptide
RIKSVTDGETTDYAAPVKG

SEQ ID NO: 453 - protein, 19 aa, synthetic construct
  REGION 1..19: note = Description of Artificial Sequence: Synthetic peptide
RIKSVTDGETTDYAAPVKG

SEQ ID NO: 454 - protein, 19 aa, synthetic construct
  REGION 1..19: note = Description of Artificial Sequence: Synthetic peptide
RIKSVTDGETTDYAAPVKG

SEQ ID NO: 455 - protein, 19 aa, synthetic construct
  REGION 1..19: note = Description of Artificial Sequence: Synthetic peptide
RIKSVTDGETTDYAAPVKG

SEQ ID NO: 456 - protein, 19 aa, synthetic construct
  REGION 1..19: note = Description of Artificial Sequence: Synthetic peptide
RIKSVTDGETTDYAAPVKG

SEQ ID NO: 457 - protein, 19 aa, synthetic construct
  REGION 1..19: note = Description of Artificial Sequence: Synthetic peptide
RIKSVTDGETTDYAAPVKG

SEQ ID NO: 458 - protein, 19 aa, synthetic construct
  REGION 1..19: note = Description of Artificial Sequence: Synthetic peptide
RIKSVTDGETTDYAAPVKG

SEQ ID NO: 459 - protein, 19 aa, synthetic construct
  REGION 1..19: note = Description of Artificial Sequence: Synthetic peptide
RIKSVTDGETTDYAAPVKG

SEQ ID NO: 460 - protein, 19 aa, synthetic construct
  REGION 1..19: note = Description of Artificial Sequence: Synthetic peptide
RIKSVTDGETTDYAAPVKG

SEQ ID NO: 461 - protein, 19 aa, synthetic construct
  REGION 1..19: note = Description of Artificial Sequence: Synthetic peptide
RIKSVTDGETTDYAAPVKG

SEQ ID NO: 462 - protein, 19 aa, synthetic construct
  REGION 1..19: note = Description of Artificial Sequence: Synthetic peptide
RIKSVTDGETTDYAAPVKG

SEQ ID NO: 463 - protein, 19 aa, synthetic construct
  REGION 1..19: note = Description of Artificial Sequence: Synthetic peptide
RIKSVTDGETTDYAAPVKG

SEQ ID NO: 464 - protein, 19 aa, synthetic construct
  REGION 1..19: note = Description of Artificial Sequence: Synthetic peptide
RIKSVTDGETTDYAAPVKG

SEQ ID NO: 465 - protein, 19 aa, synthetic construct
  REGION 1..19: note = Description of Artificial Sequence: Synthetic peptide
RIKSVTDGETTDYAAPVKG

SEQ ID NO: 466 - protein, 19 aa, synthetic construct
  REGION 1..19: note = Description of Artificial Sequence: Synthetic peptide
RIKSVTDGETTDYAAPVKG

SEQ ID NO: 467 - protein, 19 aa, synthetic construct
  REGION 1..19: note = Description of Artificial Sequence: Synthetic peptide
RIKSVTDGETTDYAAPVKG

SEQ ID NO: 468 - protein, 19 aa, synthetic construct
  REGION 1..19: note = Description of Artificial Sequence: Synthetic peptide
RIKSVTDGETTDYAAPVKG

SEQ ID NO: 469 - protein, 19 aa, synthetic construct
  REGION 1..19: note = Description of Artificial Sequence: Synthetic peptide
RIKSVTDGETTDYAAPVKG

SEQ ID NO: 470 - protein, 19 aa, synthetic construct
  REGION 1..19: note = Description of Artificial Sequence: Synthetic peptide
RIKSVTDGETTDYAAPVKG

SEQ ID NO: 471 - protein, 19 aa, synthetic construct
  REGION 1..19: note = Description of Artificial Sequence: Synthetic peptide
RIKSVTDGETTDYAAPVKG

SEQ ID NO: 472 - protein, 19 aa, synthetic construct
  REGION 1..19: note = Description of Artificial Sequence: Synthetic peptide
RIKSVTDGETTDYAAPVKG

SEQ ID NO: 473 - protein, 19 aa, synthetic construct
  REGION 1..19: note = Description of Artificial Sequence: Synthetic peptide
RIKSVTDGETTDYAAPVKG

SEQ ID NO: 474 - protein, 19 aa, synthetic construct
  REGION 1..19: note = Description of Artificial Sequence: Synthetic peptide
RIKSVTDGETTDYAAPVKG

SEQ ID NO: 475 - protein, 19 aa, synthetic construct
  REGION 1..19: note = Description of Artificial Sequence: Synthetic peptide
RIKSVTDGETTDYAAPVKG

SEQ ID NO: 476 - protein, 19 aa, synthetic construct
  REGION 1..19: note = Description of Artificial Sequence: Synthetic peptide
RIKSVTDGETTDYAAPVKG

SEQ ID NO: 477 - protein, 19 aa, synthetic construct
  REGION 1..19: note = Description of Artificial Sequence: Synthetic peptide
RIKSVTDGETTDYAAPVKG

SEQ ID NO: 478 - protein, 19 aa, synthetic construct
  REGION 1..19: note = Description of Artificial Sequence: Synthetic peptide
RIKSVTDGETTDYAAPVKG

SEQ ID NO: 479 - protein, 19 aa, synthetic construct
  REGION 1..19: note = Description of Artificial Sequence: Synthetic peptide
RIKSVTDGETTDYAAPVKG

SEQ ID NO: 480 - protein, 19 aa, synthetic construct
  REGION 1..19: note = Description of Artificial Sequence: Synthetic peptide
RIKSVTDGETTDYAAPVKG

SEQ ID NO: 481 - protein, 19 aa, synthetic construct
  REGION 1..19: note = Description of Artificial Sequence: Synthetic peptide
RIKSVTDGETTDYAAPVKG

SEQ ID NO: 482 - protein, 19 aa, synthetic construct
  REGION 1..19: note = Description of Artificial Sequence: Synthetic peptide
RIKSVTDGETTDYAAPVKG

SEQ ID NO: 483 - protein, 19 aa, synthetic construct
  REGION 1..19: note = Description of Artificial Sequence: Synthetic peptide
RIKSVTDGETTDYAAPVKG

SEQ ID NO: 484 - protein, 19 aa, synthetic construct
  REGION 1..19: note = Description of Artificial Sequence: Synthetic peptide
RIKSVTDGETTDYAAPVKG

SEQ ID NO: 485 - protein, 19 aa, synthetic construct
  REGION 1..19: note = Description of Artificial Sequence: Synthetic peptide
RIKSVTDGETTDYAAPVKG

SEQ ID NO: 486 - protein, 19 aa, synthetic construct
  REGION 1..19: note = Description of Artificial Sequence: Synthetic peptide
RIKSVTDGETTDYAAPVKG

SEQ ID NO: 487 - protein, 19 aa, synthetic construct
  REGION 1..19: note = Description of Artificial Sequence: Synthetic peptide
RIKSVTDGETTDYAAPVKG

SEQ ID NO: 488 - protein, 19 aa, synthetic construct
  REGION 1..19: note = Description of Artificial Sequence: Synthetic peptide
RIKSVTDGETTDYAAPVKG

SEQ ID NO: 489 - protein, 19 aa, synthetic construct
  REGION 1..19: note = Description of Artificial Sequence: Synthetic peptide
RIKSVTDGETTDYAAPVKG

SEQ ID NO: 490 - protein, 19 aa, synthetic construct
  REGION 1..19: note = Description of Artificial Sequence: Synthetic peptide
RIKSVTDGETTDYAAPVKG

SEQ ID NO: 491 - protein, 19 aa, synthetic construct
  REGION 1..19: note = Description of Artificial Sequence: Synthetic peptide
RIKSVTDGETTDYAAPVKG

SEQ ID NO: 492 - protein, 19 aa, synthetic construct
  REGION 1..19: note = Description of Artificial Sequence: Synthetic peptide
RIKSVTDGETTDYAAPVKG

SEQ ID NO: 493 - protein, 19 aa, synthetic construct
  REGION 1..19: note = Description of Artificial Sequence: Synthetic peptide
RIKSVTDGETTDYAAPVKG

SEQ ID NO: 494 - protein, 19 aa, synthetic construct
  REGION 1..19: note = Description of Artificial Sequence: Synthetic peptide
RIKSVTDGETTDYAAPVKG

SEQ ID NO: 495 - protein, 19 aa, synthetic construct
  REGION 1..19: note = Description of Artificial Sequence: Synthetic peptide
RIKSVTDGETTDYAAPVKG

SEQ ID NO: 496 - protein, 19 aa, synthetic construct
  REGION 1..19: note = Description of Artificial Sequence: Synthetic peptide
RIKSVTDGETTDYAAPVKG

SEQ ID NO: 497 - protein, 19 aa, synthetic construct
  REGION 1..19: note = Description of Artificial Sequence: Synthetic peptide
RIKSVTDGETTDYAAPVKG

SEQ ID NO: 498 - protein, 19 aa, synthetic construct
  REGION 1..19: note = Description of Artificial Sequence: Synthetic peptide
RIKSVTDGETTDYAAPVKG

SEQ ID NO: 499 - protein, 19 aa, synthetic construct
  REGION 1..19: note = Description of Artificial Sequence: Synthetic peptide
RIKSVTDGETTDYAAPVKG

SEQ ID NO: 500 - protein, 19 aa, synthetic construct
  REGION 1..19: note = Description of Artificial Sequence: Synthetic peptide
RIKSVTDGETTDYAAPVKG

SEQ ID NO: 501 - protein, 19 aa, synthetic construct
  REGION 1..19: note = Description of Artificial Sequence: Synthetic peptide
RIKSVTDGETTDYAAPVKG

SEQ ID NO: 502 - protein, 19 aa, synthetic construct
  REGION 1..19: note = Description of Artificial Sequence: Synthetic peptide
RIKSVTDGETTDYAAPVKG

SEQ ID NO: 503 - protein, 19 aa, synthetic construct
  REGION 1..19: note = Description of Artificial Sequence: Synthetic peptide
RIKSVTDGETTDYAAPVKG

SEQ ID NO: 504 - protein, 19 aa, synthetic construct
  REGION 1..19: note = Description of Artificial Sequence: Synthetic peptide
RIKSVTDGETTEYAASVKG

SEQ ID NO: 505 - protein, 19 aa, synthetic construct
  REGION 1..19: note = Description of Artificial Sequence: Synthetic peptide
RIKSVTDGETTEYAASVKG

SEQ ID NO: 506 - protein, 19 aa, synthetic construct
  REGION 1..19: note = Description of Artificial Sequence: Synthetic peptide
FIKSVTDGETTEYAASVKG

SEQ ID NO: 507 - protein, 19 aa, synthetic construct
  REGION 1..19: note = Description of Artificial Sequence: Synthetic peptide
RIKSVTDGETTDYAAPVKG

SEQ ID NO: 508 - protein, 19 aa, synthetic construct
  REGION 1..19: note = Description of Artificial Sequence: Synthetic peptide
RIKSVTDGETTDYAAPVKG

SEQ ID NO: 509 - protein, 19 aa, synthetic construct
  REGION 1..19: note = Description of Artificial Sequence: Synthetic peptide
RIKSVTDGETTDYAAPVKG

SEQ ID NO: 510 - protein, 19 aa, synthetic construct
  REGION 1..19: note = Description of Artificial Sequence: Synthetic peptide
RIKSVTDGETTDYAAPVKG

SEQ ID NO: 511 - protein, 19 aa, synthetic construct
  REGION 1..19: note = Description of Artificial Sequence: Synthetic peptide
RIKSVTDGETTDYAAPVKG

SEQ ID NO: 512 - protein, 19 aa, synthetic construct
  REGION 1..19: note = Description of Artificial Sequence: Synthetic peptide
RIKSVTDGETTDYAAPVKG

SEQ ID NO: 513 - protein, 19 aa, synthetic construct
  REGION 1..19: note = Description of Artificial Sequence: Synthetic peptide
RIKSVTDGETTDYAAPVKG

SEQ ID NO: 514 - protein, 19 aa, synthetic construct
  REGION 1..19: note = Description of Artificial Sequence: Synthetic peptide
RIKSVTDGETTDYAAPVKG

SEQ ID NO: 515 - protein, 19 aa, synthetic construct
  REGION 1..19: note = Description of Artificial Sequence: Synthetic peptide
RIKSVTDGETTDYAAPVKG

SEQ ID NO: 516 - protein, 19 aa, synthetic construct
  REGION 1..19: note = Description of Artificial Sequence: Synthetic peptide
RIKSVTDGETTDYAAPVKG

SEQ ID NO: 517 - protein, 19 aa, synthetic construct
  REGION 1..19: note = Description of Artificial Sequence: Synthetic peptide
RIKSVTDGETTDYAAPVKG

SEQ ID NO: 518 - protein, 19 aa, synthetic construct
  REGION 1..19: note = Description of Artificial Sequence: Synthetic peptide
RIKSVTDGETTDYAAPVKG

SEQ ID NO: 519 - protein, 19 aa, synthetic construct
  REGION 1..19: note = Description of Artificial Sequence: Synthetic peptide
RIKSVTDGETTDYAAPVKG

SEQ ID NO: 520 - protein, 19 aa, synthetic construct
  REGION 1..19: note = Description of Artificial Sequence: Synthetic peptide
RIKSVTDGETTDYAAPVKG

SEQ ID NO: 521 - protein, 19 aa, synthetic construct
  REGION 1..19: note = Description of Artificial Sequence: Synthetic peptide
RIKSVTDGETTDYAAPVKG

SEQ ID NO: 522 - protein, 19 aa, synthetic construct
  REGION 1..19: note = Description of Artificial Sequence: Synthetic peptide
RIKSVTDGETTDYAAPVKG

SEQ ID NO: 523 - protein, 19 aa, synthetic construct
  REGION 1..19: note = Description of Artificial Sequence: Synthetic peptide
RIKSVTDGETTDYAAPVKG

SEQ ID NO: 524 - protein, 19 aa, synthetic construct
  REGION 1..19: note = Description of Artificial Sequence: Synthetic peptide
RIKSVTDGETTDYAAPVKG

SEQ ID NO: 525 - protein, 19 aa, synthetic construct
  REGION 1..19: note = Description of Artificial Sequence: Synthetic peptide
RIKSVTDGETTDYAAPVKG

SEQ ID NO: 526 - protein, 19 aa, synthetic construct
  REGION 1..19: note = Description of Artificial Sequence: Synthetic peptide
RIKSVTDGETTDYAAPVKG

SEQ ID NO: 527 - protein, 19 aa, synthetic construct
  REGION 1..19: note = Description of Artificial Sequence: Synthetic peptide
RIKSVTDGETTDYAAPVKG

SEQ ID NO: 528 - protein, 19 aa, synthetic construct
  REGION 1..19: note = Description of Artificial Sequence: Synthetic peptide
RIKSVTDGETTDYAAPVKG

SEQ ID NO: 529 - protein, 19 aa, synthetic construct
  REGION 1..19: note = Description of Artificial Sequence: Synthetic peptide
RIKSVTDGETTDYAAPVKG

SEQ ID NO: 530 - protein, 19 aa, synthetic construct
  REGION 1..19: note = Description of Artificial Sequence: Synthetic peptide
RIKSVTDGETTDYAAPVKG

SEQ ID NO: 531 - protein, 19 aa, synthetic construct
  REGION 1..19: note = Description of Artificial Sequence: Synthetic peptide
RIKSVTDGETTDYAAPVKG

SEQ ID NO: 532 - protein, 19 aa, synthetic construct
  REGION 1..19: note = Description of Artificial Sequence: Synthetic peptide
RIKSVTDGETTDYAAPVKG

SEQ ID NO: 533 - protein, 19 aa, synthetic construct
  REGION 1..19: note = Description of Artificial Sequence: Synthetic peptide
RIKSVTDGETTDYAAPVKG

SEQ ID NO: 534 - protein, 19 aa, synthetic construct
  REGION 1..19: note = Description of Artificial Sequence: Synthetic peptide
RIKSVTDGETTDYAAPVKG

SEQ ID NO: 535 - protein, 19 aa, synthetic construct
  REGION 1..19: note = Description of Artificial Sequence: Synthetic peptide
RIKSVTDGETTDYAAPVKG

SEQ ID NO: 536 - protein, 19 aa, synthetic construct
  REGION 1..19: note = Description of Artificial Sequence: Synthetic peptide
RIKSVTDGETTDYAAPVKG

SEQ ID NO: 537 - protein, 19 aa, synthetic construct
  REGION 1..19: note = Description of Artificial Sequence: Synthetic peptide
RIKSVTDGETTDYAAPVKG

SEQ ID NO: 538 - protein, 19 aa, synthetic construct
  REGION 1..19: note = Description of Artificial Sequence: Synthetic peptide
RIKSVTDGETTDYAAPVKG

SEQ ID NO: 539 - protein, 19 aa, synthetic construct
  REGION 1..19: note = Description of Artificial Sequence: Synthetic peptide
RIKSVTDGETTDYAAPVKG

SEQ ID NO: 540 - protein, 19 aa, synthetic construct
  REGION 1..19: note = Description of Artificial Sequence: Synthetic peptide
RIKAADDGKQTDYAAPVKG

SEQ ID NO: 541 - protein, 19 aa, synthetic construct
  REGION 1..19: note = Description of Artificial Sequence: Synthetic peptide
RIKSVQDGEQTDYAAPVKG

SEQ ID NO: 542 - protein, 19 aa, synthetic construct
  REGION 1..19: note = Description of Artificial Sequence: Synthetic peptide
RIKSVTDGETTDYAAPVKG

SEQ ID NO: 543 - protein, 19 aa, synthetic construct
  REGION 1..19: note = Description of Artificial Sequence: Synthetic peptide
RIKSVTDGETTDYAAPVKG

SEQ ID NO: 544 - protein, 19 aa, synthetic construct
  REGION 1..19: note = Description of Artificial Sequence: Synthetic peptide
RIKSVTDGETTDYAAPVKG

SEQ ID NO: 545 - protein, 19 aa, synthetic construct
  REGION 1..19: note = Description of Artificial Sequence: Synthetic peptide
RIKSVTDGETTDYAAPVKG

SEQ ID NO: 546 - protein, 19 aa, synthetic construct
  REGION 1..19: note = Description of Artificial Sequence: Synthetic peptide
RIKAADDGKQTDYAAPVKG

SEQ ID NO: 547 - protein, 19 aa, synthetic construct
  REGION 1..19: note = Description of Artificial Sequence: Synthetic peptide
RIKAADDGKQTDYAAPVKG

SEQ ID NO: 548 - protein, 19 aa, synthetic construct
  REGION 1..19: note = Description of Artificial Sequence: Synthetic peptide
RIKAADDGKQTDYAAPVKG

SEQ ID NO: 549 - protein, 19 aa, synthetic construct
  REGION 1..19: note = Description of Artificial Sequence: Synthetic peptide
RIKAADDGKQTDYAAPVKG

SEQ ID NO: 550 - protein, 19 aa, synthetic construct
  REGION 1..19: note = Description of Artificial Sequence: Synthetic peptide
RIKAADDGKQTDYAAPVKG

SEQ ID NO: 551 - protein, 19 aa, synthetic construct
  REGION 1..19: note = Description of Artificial Sequence: Synthetic peptide
RIKAVTDGHTTDYAAPVKG

SEQ ID NO: 552 - protein, 19 aa, synthetic construct
  REGION 1..19: note = Description of Artificial Sequence: Synthetic peptide
RIKSVTDGQATDYAAPVKG

SEQ ID NO: 553 - protein, 19 aa, synthetic construct
  REGION 1..19: note = Description of Artificial Sequence: Synthetic peptide
RIKSVTDGETTDYAAPVKG

SEQ ID NO: 554 - protein, 19 aa, synthetic construct
  REGION 1..19: note = Description of Artificial Sequence: Synthetic peptide
RIKSVTDAETTDYAAPVKG

SEQ ID NO: 555 - protein, 19 aa, synthetic construct
  REGION 1..19: note = Description of Artificial Sequence: Synthetic peptide
RIKSTSDGGITDYAAPVKG

SEQ ID NO: 556 - protein, 19 aa, synthetic construct
  REGION 1..19: note = Description of Artificial Sequence: Synthetic peptide
RIKSVSDGETTDYAAPVKG

SEQ ID NO: 557 - protein, 31 aa, synthetic construct; identical to SEQ ID NO: 34
  REGION 1..31: note = Description of Artificial Sequence: Synthetic polypeptide

SEQ ID NO: 558 - protein, 31 aa, synthetic construct; identical to SEQ ID NO: 34
  REGION 1..31: note = Description of Artificial Sequence: Synthetic polypeptide

SEQ ID NO: 559 - protein, 31 aa, synthetic construct; identical to SEQ ID NO: 41
  REGION 1..31: note = Description of Artificial Sequence: Synthetic polypeptide

SEQ ID NO: 560 - protein, 31 aa, synthetic construct; identical to SEQ ID NO: 21
  REGION 1..31: note = Description of Artificial Sequence: Synthetic polypeptide

SEQ ID NO: 561 - protein, 31 aa, synthetic construct; identical to SEQ ID NO: 21
  REGION 1..31: note = Description of Artificial Sequence: Synthetic polypeptide

SEQ ID NO: 562 - protein, 31 aa, synthetic construct; identical to SEQ ID NO: 21
  REGION 1..31: note = Description of Artificial Sequence: Synthetic polypeptide

SEQ ID NO: 563 - protein, 31 aa, synthetic construct; identical to SEQ ID NO: 21
  REGION 1..31: note = Description of Artificial Sequence: Synthetic polypeptide

SEQ ID NO: 564 - protein, 31 aa, synthetic construct; identical to SEQ ID NO: 21
  REGION 1..31: note = Description of Artificial Sequence: Synthetic polypeptide

SEQ ID NO: 565 - protein, 31 aa, synthetic construct; identical to SEQ ID NO: 21
  REGION 1..31: note = Description of Artificial Sequence: Synthetic polypeptide

SEQ ID NO: 566 - protein, 31 aa, synthetic construct; identical to SEQ ID NO: 21
  REGION 1..31: note = Description of Artificial Sequence: Synthetic polypeptide

SEQ ID NO: 567 - protein, 31 aa, synthetic construct; identical to SEQ ID NO: 21
  REGION 1..31: note = Description of Artificial Sequence: Synthetic polypeptide

SEQ ID NO: 568 - protein, 31 aa, synthetic construct; identical to SEQ ID NO: 21
  REGION 1..31: note = Description of Artificial Sequence: Synthetic polypeptide

SEQ ID NO: 569 - protein, 31 aa, synthetic construct; identical to SEQ ID NO: 21
  REGION 1..31: note = Description of Artificial Sequence: Synthetic polypeptide

SEQ ID NO: 570 - protein, 31 aa, synthetic construct; identical to SEQ ID NO: 21
  REGION 1..31: note = Description of Artificial Sequence: Synthetic polypeptide

SEQ ID NO: 571 - protein, 31 aa, synthetic construct; identical to SEQ ID NO: 21
  REGION 1..31: note = Description of Artificial Sequence: Synthetic polypeptide

SEQ ID NO: 572 - protein, 31 aa, synthetic construct; identical to SEQ ID NO: 21
  REGION 1..31: note = Description of Artificial Sequence: Synthetic polypeptide

SEQ ID NO: 573 - protein, 31 aa, synthetic construct; identical to SEQ ID NO: 21
  REGION 1..31: note = Description of Artificial Sequence: Synthetic polypeptide

SEQ ID NO: 574 - protein, 31 aa, synthetic construct; identical to SEQ ID NO: 21
  REGION 1..31: note = Description of Artificial Sequence: Synthetic polypeptide

SEQ ID NO: 575 - protein, 31 aa, synthetic construct; identical to SEQ ID NO: 21
  REGION 1..31: note = Description of Artificial Sequence: Synthetic polypeptide

SEQ ID NO: 576 - protein, 31 aa, synthetic construct; identical to SEQ ID NO: 21
  REGION 1..31: note = Description of Artificial Sequence: Synthetic polypeptide

SEQ ID NO: 577 - protein, 31 aa, synthetic construct; identical to SEQ ID NO: 21
  REGION 1..31: note = Description of Artificial Sequence: Synthetic polypeptide

SEQ ID NO: 578 - protein, 31 aa, synthetic construct; identical to SEQ ID NO: 21
  REGION 1..31: note = Description of Artificial Sequence: Synthetic polypeptide

SEQ ID NO: 579 - protein, 31 aa, synthetic construct; identical to SEQ ID NO: 21
  REGION 1..31: note = Description of Artificial Sequence: Synthetic polypeptide

SEQ ID NO: 580 - protein, 31 aa, synthetic construct; identical to SEQ ID NO: 21
  REGION 1..31: note = Description of Artificial Sequence: Synthetic polypeptide

SEQ ID NO: 581 - protein, 31 aa, synthetic construct; identical to SEQ ID NO: 21
  REGION 1..31: note = Description of Artificial Sequence: Synthetic polypeptide

SEQ ID NO: 582 - protein, 31 aa, synthetic construct; identical to SEQ ID NO: 21
  REGION 1..31: note = Description of Artificial Sequence: Synthetic polypeptide

SEQ ID NO: 583 - protein, 31 aa, synthetic construct; identical to SEQ ID NO: 21
  REGION 1..31: note = Description of Artificial Sequence: Synthetic polypeptide

SEQ ID NO: 584 - protein, 31 aa, synthetic construct; identical to SEQ ID NO: 21
  REGION 1..31: note = Description of Artificial Sequence: Synthetic polypeptide

SEQ ID NO: 585 - protein, 31 aa, synthetic construct; identical to SEQ ID NO: 21
  REGION 1..31: note = Description of Artificial Sequence: Synthetic polypeptide

SEQ ID NO: 586 - protein, 31 aa, synthetic construct; identical to SEQ ID NO: 21
  REGION 1..31: note = Description of Artificial Sequence: Synthetic polypeptide

SEQ ID NO: 587 - protein, 31 aa, synthetic construct; identical to SEQ ID NO: 21
  REGION 1..31: note = Description of Artificial Sequence: Synthetic polypeptide

SEQ ID NO: 588 - protein, 31 aa, synthetic construct; identical to SEQ ID NO: 21
  REGION 1..31: note = Description of Artificial Sequence: Synthetic polypeptide

SEQ ID NO: 589 - protein, 31 aa, synthetic construct
  REGION 1..31: note = Description of Artificial Sequence: Synthetic polypeptide
ISSFCCRGGSCPSHDTSYCGGQYKSYYYMDV

SEQ ID NO: 590 - protein, 31 aa, synthetic construct
  REGION 1..31: note = Description of Artificial Sequence: Synthetic polypeptide
TTSFCCRGGSCPSHDTSYCGGQYKSYYYMDV

SEQ ID NO: 591 - protein, 31 aa, synthetic construct
  REGION 1..31: note = Description of Artificial Sequence: Synthetic polypeptide
TSPFCCRGGSCPSHDTSYCGGQYKSYYYMDV

SEQ ID NO: 592 - protein, 31 aa, synthetic construct
  REGION 1..31: note = Description of Artificial Sequence: Synthetic polypeptide
TSAFCCRGGSCPSHDTSYCGGQYKSYYYMDV

SEQ ID NO: 593 - protein, 31 aa, synthetic construct
  REGION 1..31: note = Description of Artificial Sequence: Synthetic polypeptide
TSSYCCRGGSCPSHDTSYCGGQYKSYYYMDV

SEQ ID NO: 594 - protein, 31 aa, synthetic construct
  REGION 1..31: note = Description of Artificial Sequence: Synthetic polypeptide
TSSFCCLGGSCPSHDTSYCGGQYKSYYYMDV

SEQ ID NO: 595 - protein, 31 aa, synthetic construct
  REGION 1..31: note = Description of Artificial Sequence: Synthetic polypeptide
TSSFCCHGGSCPSHDTSYCGGQYKSYYYMDV

SEQ ID NO: 596 - protein, 31 aa, synthetic construct
  REGION 1..31: note = Description of Artificial Sequence: Synthetic polypeptide
TSSFCCQGGSCPSHDTSYCGGQYKSYYYMDV

SEQ ID NO: 597 - protein, 31 aa, synthetic construct
  REGION 1..31: note = Description of Artificial Sequence: Synthetic polypeptide
TSSFCCRSGSCPSHDTSYCGGQYKSYYYMDV

SEQ ID NO: 598 - protein, 31 aa, synthetic construct
  REGION 1..31: note = Description of Artificial Sequence: Synthetic polypeptide
TSSFCCRGASCPSHDTSYCGGQYKSYYYMDV

SEQ ID NO: 599 - protein, 31 aa, synthetic construct
  REGION 1..31: note = Description of Artificial Sequence: Synthetic polypeptide
TSSFCCRGKSCPSHDTSYCGGQYKSYYYMDV

SEQ ID NO: 600 - protein, 31 aa, synthetic construct
  REGION 1..31: note = Description of Artificial Sequence: Synthetic polypeptide
TSSFCCRGNSCPSHDTSYCGGQYKSYYYMDV

SEQ ID NO: 601 - protein, 31 aa, synthetic construct
  REGION 1..31: note = Description of Artificial Sequence: Synthetic polypeptide
TSSFCCRGGNCPSHDTSYCGGQYKSYYYMDV

SEQ ID NO: 602 - protein, 31 aa, synthetic construct
  REGION 1..31: note = Description of Artificial Sequence: Synthetic polypeptide
TSSFCCRGGQCPSHDTSYCGGQYKSYYYMDV

SEQ ID NO: 603 - protein, 31 aa, synthetic construct
  REGION 1..31: note = Description of Artificial Sequence: Synthetic polypeptide
TSSFCCRGGACPSHDTSYCGGQYKSYYYMDV

SEQ ID NO: 604 - protein, 31 aa, synthetic construct
  REGION 1..31: note = Description of Artificial Sequence: Synthetic polypeptide
TSSFCCRGGSCASHDTSYCGGQYKSYYYMDV

SEQ ID NO: 605 - protein, 31 aa, synthetic construct
  REGION 1..31: note = Description of Artificial Sequence: Synthetic polypeptide
TSSFCCRGGSCLSHDTSYCGGQYKSYYYMDV

SEQ ID NO: 606 - protein, 31 aa, synthetic construct
  REGION 1..31: note = Description of Artificial Sequence: Synthetic polypeptide
TSSFCCRGGSCPAHDTSYCGGQYKSYYYMDV

SEQ ID NO: 607 - protein, 31 aa, synthetic construct
  REGION 1..31: note = Description of Artificial Sequence: Synthetic polypeptide
TSSFCCRGGSCPNHDTSYCGGQYKSYYYMDV

SEQ ID NO: 608 - protein, 31 aa, synthetic construct
  REGION 1..31: note = Description of Artificial Sequence: Synthetic polypeptide
TSSFCCRGGSCPSSDTSYCGGQYKSYYYMDV

SEQ ID NO: 609 - protein, 31 aa, synthetic construct
  REGION 1..31: note = Description of Artificial Sequence: Synthetic polypeptide
TSSFCCRGGSCPSQDTSYCGGQYKSYYYMDV

SEQ ID NO: 610 - protein, 31 aa, synthetic construct
  REGION 1..31: note = Description of Artificial Sequence: Synthetic polypeptide
TSSFCCRGGSCPSHETSYCGGQYKSYYYMDV

SEQ ID NO: 611 - protein, 31 aa, synthetic construct
  REGION 1..31: note = Description of Artificial Sequence: Synthetic polypeptide
TSSFCCRGGSCPSHDQSYCGGQYKSYYYMDV

SEQ ID NO: 612 - protein, 31 aa, synthetic construct
  REGION 1..31: note = Description of Artificial Sequence: Synthetic polypeptide
TSSFCCRGGSCPSHDTSMCGGQYKSYYYMDV

SEQ ID NO: 613 - protein, 31 aa, synthetic construct
  REGION 1..31: note = Description of Artificial Sequence: Synthetic polypeptide
TSSFCCRGGSCPSHDTSYCAGQYKSYYYMDV

SEQ ID NO: 614 - protein, 31 aa, synthetic construct
  REGION 1..31: note = Description of Artificial Sequence: Synthetic polypeptide
TSSFCCRGGSCPSHDTSYCNGQYKSYYYMDV

SEQ ID NO: 615 - protein, 31 aa, synthetic construct
  REGION 1..31: note = Description of Artificial Sequence: Synthetic polypeptide
TSSFCCRGGSCPSHDTSYCGNQYKSYYYMDV

SEQ ID NO: 616 - protein, 31 aa, synthetic construct
  REGION 1..31: note = Description of Artificial Sequence: Synthetic polypeptide
TSSFCCRGGSCPSHDTSYCGAQYKSYYYMDV

SEQ ID NO: 617 - protein, 31 aa, synthetic construct
  REGION 1..31: note = Description of Artificial Sequence: Synthetic polypeptide
TSSFCCRGGSCPSHDTSYCGGSYKSYYYMDV

SEQ ID NO: 618 - protein, 31 aa, synthetic construct; identical to SEQ ID NO: 33
  REGION 1..31: note = Description of Artificial Sequence: Synthetic polypeptide

SEQ ID NO: 619 - protein, 31 aa, synthetic construct
  REGION 1..31: note = Description of Artificial Sequence: Synthetic polypeptide
TSSFCCRGGSCPSHDTSYCGGQFKSYYYMDV

SEQ ID NO: 620 - protein, 31 aa, synthetic construct
  REGION 1..31: note = Description of Artificial Sequence: Synthetic polypeptide
TSSFCCRGGSCPSHDTSYCGGQYPSYYYMDV

SEQ ID NO: 621 - protein, 31 aa, synthetic construct
  REGION 1..31: note = Description of Artificial Sequence: Synthetic polypeptide
TSSFCCRGGSCPSHDTSYCGGQYASYYYMDV

SEQ ID NO: 622 - protein, 31 aa, synthetic construct
  REGION 1..31: note = Description of Artificial Sequence: Synthetic polypeptide
TSSFCCRGGSCPSHDTSYCGGQYQSYYYMDV

SEQ ID NO: 623 - protein, 31 aa, synthetic construct
  REGION 1..31: note = Description of Artificial Sequence: Synthetic polypeptide
TSSFCCRGGSCPSHDTSYCGGQYKDYYYMDV

SEQ ID NO: 624 - protein, 31 aa, synthetic construct; identical to SEQ ID NO: 28
  REGION 1..31: note = Description of Artificial Sequence: Synthetic polypeptide

SEQ ID NO: 625 - protein, 31 aa, synthetic construct
  REGION 1..31: note = Description of Artificial Sequence: Synthetic polypeptide
TSSFCCRGGSCPSHDTSYCGGQYKSYFYMDV

SEQ ID NO: 626 - protein, 31 aa, synthetic construct
  REGION 1..31: note = Description of Artificial Sequence: Synthetic polypeptide
TSSFCCRGGSCPSHDTSYCGGQYKSYYWMDV

SEQ ID NO: 627 - protein, 31 aa, synthetic construct
  REGION 1..31: note = Description of Artificial Sequence: Synthetic polypeptide
TSSFCCRGGSCPSHDTSYCGGQYKSYYLMDV

SEQ ID NO: 628 - protein, 31 aa, synthetic construct
  REGION 1..31: note = Description of Artificial Sequence: Synthetic polypeptide
TSSFCCRGGSCPSHDTSYCGGQYKSYYYVDV

SEQ ID NO: 629 - protein, 31 aa, synthetic construct
  REGION 1..31: note = Description of Artificial Sequence: Synthetic polypeptide
TSSFCCRGGSCPSHDTSYCGGQYKSYYYFDV

SEQ ID NO: 630 - protein, 31 aa, synthetic construct
  REGION 1..31: note = Description of Artificial Sequence: Synthetic polypeptide
TSSFCCRGGSCPSHDTSYCGGQYKSYYYMNV

SEQ ID NO: 631 - protein, 31 aa, synthetic construct
  REGION 1..31: note = Description of Artificial Sequence: Synthetic polypeptide
TSSFCCRGGSCPSHDTSYCGGQYKSYYYMDI

SEQ ID NO: 632 - protein, 31 aa, synthetic construct
  REGION 1..31: note = Description of Artificial Sequence: Synthetic polypeptide
TSSFCCRGGSCPSHDTSYCGGQYKSYYYMDP

SEQ ID NO: 633 - protein, 31 aa, synthetic construct
  REGION 1..31: note = Description of Artificial Sequence: Synthetic polypeptide
TSSFCCRGGSCPSHDTSYCGGQFKDYYYMDV

SEQ ID NO: 634 - protein, 31 aa, synthetic construct
  REGION 1..31: note = Description of Artificial Sequence: Synthetic polypeptide
TSSFCCRGGSCPSHDTSYCGGQSKQYYYMDV

SEQ ID NO: 635 - protein, 31 aa, synthetic construct
  REGION 1..31: note = Description of Artificial Sequence: Synthetic polypeptide
TSSFCCRGGSCPSHDTSYCGGQSKKYYYMDV

SEQ ID NO: 636 - protein, 31 aa, synthetic construct
  REGION 1..31: note = Description of Artificial Sequence: Synthetic polypeptide
TSSFSCRGGSCPSHDTSYSGGQYKSYYYMDV

SEQ ID NO: 637 - protein, 31 aa, synthetic construct
  REGION 1..31: note = Description of Artificial Sequence: Synthetic polypeptide
TSSFACRGGSCPSHDTSYVGGQYKSYYYMDV

SEQ ID NO: 638 - protein, 31 aa, synthetic construct
  REGION 1..31: note = Description of Artificial Sequence: Synthetic polypeptide
TSSFCCRGNSCPAHDTSYCGGQYPSYYYMDV

SEQ ID NO: 639 - protein, 31 aa, synthetic construct
  REGION 1..31: note = Description of Artificial Sequence: Synthetic polypeptide
TSSYCCLGGSCPSHDTSYCGGSYKSYYYMDV

SEQ ID NO: 640 - protein, 31 aa, synthetic construct
  REGION 1..31: note = Description of Artificial Sequence: Synthetic polypeptide
TSSFCCRGKSCPSHDNSYCGGQYASYYYMDV

SEQ ID NO: 641 - protein, 31 aa, synthetic construct
  REGION 1..31: note = Description of Artificial Sequence: Synthetic polypeptide
TSSYCCRGGSCPSHDTSYCGGQFKSYYYMDP

SEQ ID NO: 642 - protein, 31 aa, synthetic construct
  REGION 1..31: note = Description of Artificial Sequence: Synthetic polypeptide
TSTFCCRGGSCLSHDTSYCGGQYKSYYWMDV

SEQ ID NO: 643 - protein, 31 aa, synthetic construct; identical to SEQ ID NO: 21
  REGION 1..31: note = Description of Artificial Sequence: Synthetic polypeptide

SEQ ID NO: 644 - protein, 31 aa, synthetic construct; identical to SEQ ID NO: 21
  REGION 1..31: note = Description of Artificial Sequence: Synthetic polypeptide

SEQ ID NO: 645 - protein, 31 aa, synthetic construct; identical to SEQ ID NO: 21
  REGION 1..31: note = Description of Artificial Sequence: Synthetic polypeptide

SEQ ID NO: 646 - protein, 31 aa, synthetic construct; identical to SEQ ID NO: 21
  REGION 1..31: note = Description of Artificial Sequence: Synthetic polypeptide

SEQ ID NO: 647 - protein, 31 aa, synthetic construct; identical to SEQ ID NO: 21
  REGION 1..31: note = Description of Artificial Sequence: Synthetic polypeptide

SEQ ID NO: 648 - protein, 31 aa, synthetic construct; identical to SEQ ID NO: 21
  REGION 1..31: note = Description of Artificial Sequence: Synthetic polypeptide

SEQ ID NO: 649 - protein, 31 aa, synthetic construct; identical to SEQ ID NO: 21
  REGION 1..31: note = Description of Artificial Sequence: Synthetic polypeptide

SEQ ID NO: 650 - protein, 31 aa, synthetic construct; identical to SEQ ID NO: 21
  REGION 1..31: note = Description of Artificial Sequence: Synthetic polypeptide

SEQ ID NO: 651 - protein, 31 aa, synthetic construct; identical to SEQ ID NO: 21
  REGION 1..31: note = Description of Artificial Sequence: Synthetic polypeptide

SEQ ID NO: 652 - protein, 31 aa, synthetic construct; identical to SEQ ID NO: 21
  REGION 1..31: note = Description of Artificial Sequence: Synthetic polypeptide

SEQ ID NO: 653 - protein, 31 aa, synthetic construct; identical to SEQ ID NO: 21
  REGION 1..31: note = Description of Artificial Sequence: Synthetic polypeptide

SEQ ID NO: 654 - protein, 31 aa, synthetic construct; identical to SEQ ID NO: 21
  REGION 1..31: note = Description of Artificial Sequence: Synthetic polypeptide

SEQ ID NO: 655 - protein, 31 aa, synthetic construct; identical to SEQ ID NO: 21
  REGION 1..31: note = Description of Artificial Sequence: Synthetic polypeptide

SEQ ID NO: 656 - protein, 31 aa, synthetic construct; identical to SEQ ID NO: 21
  REGION 1..31: note = Description of Artificial Sequence: Synthetic polypeptide

SEQ ID NO: 657 - protein, 31 aa, synthetic construct; identical to SEQ ID NO: 21
  REGION 1..31: note = Description of Artificial Sequence: Synthetic polypeptide

SEQ ID NO: 658 - protein, 31 aa, synthetic construct; identical to SEQ ID NO: 21
  REGION 1..31: note = Description of Artificial Sequence: Synthetic polypeptide

SEQ ID NO: 659 - protein, 31 aa, synthetic construct; identical to SEQ ID NO: 21
  REGION 1..31: note = Description of Artificial Sequence: Synthetic polypeptide

SEQ ID NO: 660 - protein, 31 aa, synthetic construct; identical to SEQ ID NO: 21
  REGION 1..31: note = Description of Artificial Sequence: Synthetic polypeptide

SEQ ID NO: 661 - protein, 31 aa, synthetic construct; identical to SEQ ID NO: 21
  REGION 1..31: note = Description of Artificial Sequence: Synthetic polypeptide

SEQ ID NO: 662 - protein, 31 aa, synthetic construct; identical to SEQ ID NO: 21
  REGION 1..31: note = Description of Artificial Sequence: Synthetic polypeptide

SEQ ID NO: 663 - protein, 31 aa, synthetic construct; identical to SEQ ID NO: 21
  REGION 1..31: note = Description of Artificial Sequence: Synthetic polypeptide

SEQ ID NO: 664 - protein, 31 aa, synthetic construct; identical to SEQ ID NO: 21
  REGION 1..31: note = Description of Artificial Sequence: Synthetic polypeptide

SEQ ID NO: 665 - protein, 31 aa, synthetic construct; identical to SEQ ID NO: 21
  REGION 1..31: note = Description of Artificial Sequence: Synthetic polypeptide

SEQ ID NO: 666 - protein, 31 aa, synthetic construct; identical to SEQ ID NO: 21
  REGION 1..31: note = Description of Artificial Sequence: Synthetic polypeptide

SEQ ID NO: 667 - protein, 31 aa, synthetic construct; identical to SEQ ID NO: 21
  REGION 1..31: note = Description of Artificial Sequence: Synthetic polypeptide

SEQ ID NO: 668 - protein, 31 aa, synthetic construct; identical to SEQ ID NO: 21
  REGION 1..31: note = Description of Artificial Sequence: Synthetic polypeptide

SEQ ID NO: 669 - protein, 31 aa, synthetic construct; identical to SEQ ID NO: 21
  REGION 1..31: note = Description of Artificial Sequence: Synthetic polypeptide

SEQ ID NO: 670 - protein, 31 aa, synthetic construct; identical to SEQ ID NO: 21
  REGION 1..31: note = Description of Artificial Sequence: Synthetic polypeptide

SEQ ID NO: 671 - protein, 31 aa, synthetic construct; identical to SEQ ID NO: 21
  REGION 1..31: note = Description of Artificial Sequence: Synthetic polypeptide

SEQ ID NO: 672 - protein, 31 aa, synthetic construct; identical to SEQ ID NO: 21
  REGION 1..31: note = Description of Artificial Sequence: Synthetic polypeptide

SEQ ID NO: 673 - protein, 31 aa, synthetic construct; identical to SEQ ID NO: 21
  REGION 1..31: note = Description of Artificial Sequence: Synthetic polypeptide

SEQ ID NO: 674 - protein, 31 aa, synthetic construct; identical to SEQ ID NO: 21
  REGION 1..31: note = Description of Artificial Sequence: Synthetic polypeptide

SEQ ID NO: 675 - protein, 31 aa, synthetic construct; identical to SEQ ID NO: 21
  REGION 1..31: note = Description of Artificial Sequence: Synthetic polypeptide

SEQ ID NO: 676 - protein, 31 aa, synthetic construct; identical to SEQ ID NO: 21
  REGION 1..31: note = Description of Artificial Sequence: Synthetic polypeptide

SEQ ID NO: 677 - protein, 31 aa, synthetic construct; identical to SEQ ID NO: 21
  REGION 1..31: note = Description of Artificial Sequence: Synthetic polypeptide

SEQ ID NO: 678 - protein, 31 aa, synthetic construct; identical to SEQ ID NO: 21
  REGION 1..31: note = Description of Artificial Sequence: Synthetic polypeptide

SEQ ID NO: 679 - protein, 31 aa, synthetic construct; identical to SEQ ID NO: 21
  REGION 1..31: note = Description of Artificial Sequence: Synthetic polypeptide

SEQ ID NO: 680 - protein, 31 aa, synthetic construct; identical to SEQ ID NO: 21
  REGION 1..31: note = Description of Artificial Sequence: Synthetic polypeptide

SEQ ID NO: 681 - protein, 31 aa, synthetic construct; identical to SEQ ID NO: 21
  REGION 1..31: note = Description of Artificial Sequence: Synthetic polypeptide

SEQ ID NO: 682 - protein, 31 aa, synthetic construct; identical to SEQ ID NO: 21
  REGION 1..31: note = Description of Artificial Sequence: Synthetic polypeptide

SEQ ID NO: 683 - protein, 31 aa, synthetic construct; identical to SEQ ID NO: 21
  REGION 1..31: note = Description of Artificial Sequence: Synthetic polypeptide

SEQ ID NO: 684 - protein, 31 aa, synthetic construct; identical to SEQ ID NO: 21
  REGION 1..31: note = Description of Artificial Sequence: Synthetic polypeptide

SEQ ID NO: 685 - protein, 31 aa, synthetic construct; identical to SEQ ID NO: 21
  REGION 1..31: note = Description of Artificial Sequence: Synthetic polypeptide

SEQ ID NO: 686 - protein, 31 aa, synthetic construct; identical to SEQ ID NO: 21
  REGION 1..31: note = Description of Artificial Sequence: Synthetic polypeptide

SEQ ID NO: 687 - protein, 31 aa, synthetic construct; identical to SEQ ID NO: 21
  REGION 1..31: note = Description of Artificial Sequence: Synthetic polypeptide

SEQ ID NO: 688 - protein, 31 aa, synthetic construct; identical to SEQ ID NO: 21
  REGION 1..31: note = Description of Artificial Sequence: Synthetic polypeptide

SEQ ID NO: 689 - protein, 31 aa, synthetic construct; identical to SEQ ID NO: 21
  REGION 1..31: note = Description of Artificial Sequence: Synthetic polypeptide

SEQ ID NO: 690 - protein, 31 aa, synthetic construct; identical to SEQ ID NO: 21
  REGION 1..31: note = Description of Artificial Sequence: Synthetic polypeptide

SEQ ID NO: 691 - protein, 31 aa, synthetic construct; identical to SEQ ID NO: 21
  REGION 1..31: note = Description of Artificial Sequence: Synthetic polypeptide

SEQ ID NO: 692 - protein, 31 aa, synthetic construct; identical to SEQ ID NO: 21
  REGION 1..31: note = Description of Artificial Sequence: Synthetic polypeptide

SEQ ID NO: 693 - protein, 31 aa, synthetic construct; identical to SEQ ID NO: 21
  REGION 1..31: note = Description of Artificial Sequence: Synthetic polypeptide

SEQ ID NO: 694 - protein, 31 aa, synthetic construct; identical to SEQ ID NO: 21
  REGION 1..31: note = Description of Artificial Sequence: Synthetic polypeptide

SEQ ID NO: 695 - protein, 31 aa, synthetic construct; identical to SEQ ID NO: 21
  REGION 1..31: note = Description of Artificial Sequence: Synthetic polypeptide

SEQ ID NO: 696 - protein, 31 aa, synthetic construct; identical to SEQ ID NO: 21
  REGION 1..31: note = Description of Artificial Sequence: Synthetic polypeptide

SEQ ID NO: 697 - protein, 31 aa, synthetic construct; identical to SEQ ID NO: 21
  REGION 1..31: note = Description of Artificial Sequence: Synthetic polypeptide

SEQ ID NO: 698 - protein, 31 aa, synthetic construct; identical to SEQ ID NO: 21
  REGION 1..31: note = Description of Artificial Sequence: Synthetic polypeptide

SEQ ID NO: 699 - protein, 31 aa, synthetic construct; identical to SEQ ID NO: 21
  REGION 1..31: note = Description of Artificial Sequence: Synthetic polypeptide

SEQ ID NO: 700 - protein, 31 aa, synthetic construct; identical to SEQ ID NO: 21
  REGION 1..31: note = Description of Artificial Sequence: Synthetic polypeptide

SEQ ID NO: 701 - protein, 31 aa, synthetic construct
  REGION 1..31: note = Description of Artificial Sequence: Synthetic polypeptide
TSSYCCRSGSCPSSDTSYCNGQFKSYYYMDP

SEQ ID NO: 702 - protein, 31 aa, synthetic construct
  REGION 1..31: note = Description of Artificial Sequence: Synthetic polypeptide
TSSFCCRSGSCPSSDTSYCNGQYKSYYYVNI

SEQ ID NO: 703 - protein, 31 aa, synthetic construct
  REGION 1..31: note = Description of Artificial Sequence: Synthetic polypeptide
TTSFCCRGASCPSHDTSYCAGSYKSYYYVNI

SEQ ID NO: 704 - protein, 31 aa, synthetic construct
  REGION 1..31: note = Description of Artificial Sequence: Synthetic polypeptide
TSAFCCRGKSCPSSDTSYCGGQYPSYYYVNI

SEQ ID NO: 705 - protein, 31 aa, synthetic construct
  REGION 1..31: note = Description of Artificial Sequence: Synthetic polypeptide
TSAFCCRGKSCPSHDTSFCGGQDKRYYYVNI

SEQ ID NO: 706 - protein, 31 aa, synthetic construct
  REGION 1..31: note = Description of Artificial Sequence: Synthetic polypeptide
TSAFCCRGGNCPSHETSYCNGQNKQYYYMDV

SEQ ID NO: 707 - protein, 31 aa, synthetic construct
  REGION 1..31: note = Description of Artificial Sequence: Synthetic polypeptide
TSSFCCRGNQCPSSDTSFCGGQDKRYYYMDP

SEQ ID NO: 708 - protein, 31 aa, synthetic construct
  REGION 1..31: note = Description of Artificial Sequence: Synthetic polypeptide
TTSFCCRGNQCPSHETSYCGGYYKSYFYMDV

SEQ ID NO: 709 - protein, 31 aa, synthetic construct
  REGION 1..31: note = Description of Artificial Sequence: Synthetic polypeptide
TSSYCCRGKQCPSHDTSYCAGQYADYYYMDV

SEQ ID NO: 710 - protein, 31 aa, synthetic construct
  REGION 1..31: note = Description of Artificial Sequence: Synthetic polypeptide
ISSFCCRGKQCPSSDTSYCNGQYADYYYMDV

SEQ ID NO: 711 - protein, 31 aa, synthetic construct
  REGION 1..31: note = Description of Artificial Sequence: Synthetic polypeptide
TSSFCCRGKQCPSSDTSYCNGQYADYYYVNI

SEQ ID NO: 712 - protein, 31 aa, synthetic construct
  REGION 1..31: note = Description of Artificial Sequence: Synthetic polypeptide
ISSFCCRGKQCPSSDTSFCGGQDKRYYFMDV

SEQ ID NO: 713 - protein, 31 aa, synthetic construct
  REGION 1..31: note = Description of Artificial Sequence: Synthetic polypeptide
TSAFCCRGKQCPSSDTSYCGGQYASFYYMDV

SEQ ID NO: 714 - protein, 31 aa, synthetic construct
  REGION 1..31: note = Description of Artificial Sequence: Synthetic polypeptide
TSSFCCQGNNCPSSDTSYCGGYYKDYYYMDV

SEQ ID NO: 715 - protein, 31 aa, synthetic construct
  REGION 1..31: note = Description of Artificial Sequence: Synthetic polypeptide
TSSFCCQGNNCPSHDTSYCGGQYKSYYYVNI

SEQ ID NO: 716 - protein, 31 aa, synthetic construct
  REGION 1..31: note = Description of Artificial Sequence: Synthetic polypeptide
TSSFCCQGKNCPSHETSYCGGQYADYYYMDV

SEQ ID NO: 717 - protein, 31 aa, synthetic construct
  REGION 1..31: note = Description of Artificial Sequence: Synthetic polypeptide
TTSFCCHGNSCPSSDTSYCGGQNKQYYYMDV

SEQ ID NO: 718 - protein, 31 aa, synthetic construct
  REGION 1..31: note = Description of Artificial Sequence: Synthetic polypeptide
ISSFCCHGNSCPSHDTSYCNGQNKQYYYMDV

SEQ ID NO: 719 - protein, 31 aa, synthetic construct
  REGION 1..31: note = Description of Artificial Sequence: Synthetic polypeptide
ISSFCCHSNNCPSSDTSYCNGQYKQYYYMDV

SEQ ID NO: 720 - protein, 31 aa, synthetic construct
  REGION 1..31: note = Description of Artificial Sequence: Synthetic polypeptide
TSSFCCHSNNCPSHDTSYCGGQYKSYYYVNI

SEQ ID NO: 721 - protein, 31 aa, synthetic construct
  REGION 1..31: note = Description of Artificial Sequence: Synthetic polypeptide
ISSFACHSNNCPSSDTSYVNGYYKQYYFMDV

SEQ ID NO: 722 - protein, 31 aa, synthetic construct
  REGION 1..31: note = Description of Artificial Sequence: Synthetic polypeptide
TSSFCCHSNNCPSSDTSYCNGQYKQYYYVNI

SEQ ID NO: 723 - protein, 31 aa, synthetic construct
  REGION 1..31: note = Description of Artificial Sequence: Synthetic polypeptide
TSSFCCLGKACLSHDTSYCGGQYASYYYVNI

SEQ ID NO: 724 - protein, 31 aa, synthetic construct
  REGION 1..31: note = Description of Artificial Sequence: Synthetic polypeptide
TSSFCCLGKACLSSDTSYCGGYYASYYFVNI

SEQ ID NO: 725 - protein, 31 aa, synthetic construct
  REGION 1..31: note = Description of Artificial Sequence: Synthetic polypeptide
TSSFACLGKACLSSDTSYVGGYYASYYFVNI

SEQ ID NO: 726 - protein, 31 aa, synthetic construct
  REGION 1..31: note = Description of Artificial Sequence: Synthetic polypeptide
TSSYCCLGNSCPSSDTSYCGGQFKSYYYMDP

SEQ ID NO: 727 - protein, 31 aa, synthetic construct
  REGION 1..31: note = Description of Artificial Sequence: Synthetic polypeptide
TSSYCCLGNSCPSSDTSFCGGQDKRYYYMDP

SEQ ID NO: 728 - protein, 31 aa, synthetic construct
  REGION 1..31: note = Description of Artificial Sequence: Synthetic polypeptide
ISSFCCLGGNCPSSETSYCGNQYPSYYYMDV

SEQ ID NO: 729 - protein, 31 aa, synthetic construct
  REGION 1..31: note = Description of Artificial Sequence: Synthetic polypeptide
ISSFCCLGGNCPSSETSYCGNYYPSYFYMDV

SEQ ID NO: 730 - protein, 31 aa, synthetic construct
  REGION 1..31: note = Description of Artificial Sequence: Synthetic polypeptide
TSSFCCLGGNCPSSETSYCGNQYPSYYYVNI

SEQ ID NO: 731 - protein, 31 aa, synthetic construct
  REGION 1..31: note = Description of Artificial Sequence: Synthetic polypeptide
TTSFACRGNQCPSHETSYVGGYYKSYFYMDV

SEQ ID NO: 732 - protein, 31 aa, synthetic construct
  REGION 1..31: note = Description of Artificial Sequence: Synthetic polypeptide
TTSFACRGNQCPSSETSYVGGYYKSYFFMDV

SEQ ID NO: 733 - protein, 31 aa, synthetic construct
  REGION 1..31: note = Description of Artificial Sequence: Synthetic polypeptide
ISSFACRGKQCPSSDTSYVGGQFKSYYFMDV

SEQ ID NO: 734 - protein, 31 aa, synthetic construct
  REGION 1..31: note = Description of Artificial Sequence: Synthetic polypeptide
TSSFCCRGGSCLSHDTSYCGGQYKSYYWMDV

SEQ ID NO: 735 - protein, 31 aa, synthetic construct; identical to SEQ ID NO: 639
  REGION 1..31: note = Description of Artificial Sequence: Synthetic polypeptide

SEQ ID NO: 736 - protein, 31 aa, synthetic construct; identical to SEQ ID NO: 44
  REGION 1..31: note = Description of Artificial Sequence: Synthetic polypeptide

SEQ ID NO: 737 - protein, 31 aa, synthetic construct; identical to SEQ ID NO: 637
  REGION 1..31: note = Description of Artificial Sequence: Synthetic polypeptide

SEQ ID NO: 738 - protein, 31 aa, synthetic construct; identical to SEQ ID NO: 639
  REGION 1..31: note = Description of Artificial Sequence: Synthetic polypeptide

SEQ ID NO: 739 - protein, 31 aa, synthetic construct
  REGION 1..31: note = Description of Artificial Sequence: Synthetic polypeptide
TSSFCCRGKSCPSHDTSYCGGQYASYYYMDV

SEQ ID NO: 740 - protein, 31 aa, synthetic construct; identical to SEQ ID NO: 45
  REGION 1..31: note = Description of Artificial Sequence: Synthetic polypeptide

SEQ ID NO: 741 - protein, 31 aa, synthetic construct; identical to SEQ ID NO: 20
  REGION 1..31: note = Description of Artificial Sequence: Synthetic polypeptide

SEQ ID NO: 742 - protein, 31 aa, synthetic construct; identical to SEQ ID NO: 46
  REGION 1..31: note = Description of Artificial Sequence: Synthetic polypeptide

SEQ ID NO: 743 - protein, 31 aa, synthetic construct; identical to SEQ ID NO: 47
  REGION 1..31: note = Description of Artificial Sequence: Synthetic polypeptide

SEQ ID NO: 744 - protein, 31 aa, synthetic construct; identical to SEQ ID NO: 27
  REGION 1..31: note = Description of Artificial Sequence: Synthetic polypeptide

SEQ ID NO: 745 - protein, 31 aa, synthetic construct; identical to SEQ ID NO: 21
  REGION 1..31: note = Description of Artificial Sequence: Synthetic polypeptide

SEQ ID NO: 746 - protein, 31 aa, synthetic construct; identical to SEQ ID NO: 21
  REGION 1..31: note = Description of Artificial Sequence: Synthetic polypeptide

SEQ ID NO: 747 - protein, 31 aa, synthetic construct; identical to SEQ ID NO: 739
  REGION 1..31: note = Description of Artificial Sequence: Synthetic polypeptide

SEQ ID NO: 748 - protein, 31 aa, synthetic construct
  REGION 1..31: note = Description of Artificial Sequence: Synthetic polypeptide
TSSFCCRSGSCPSSDTSYCNGQYKSYYWMDV

SEQ ID NO: 749 - protein, 31 aa, synthetic construct; identical to SEQ ID NO: 37
  REGION 1..31: note = Description of Artificial Sequence: Synthetic polypeptide

SEQ ID NO: 750 - protein, 31 aa, synthetic construct
  REGION 1..31: note = Description of Artificial Sequence: Synthetic polypeptide
TSSFCCRGGSCPSRDTSYCGGQYKSYYFMDV

SEQ ID NO: 751 - protein, 13 aa, synthetic construct
  REGION 1..13: note = Description of Artificial Sequence: Synthetic peptide
SGSSSNIGSSSVS

SEQ ID NO: 752 - protein, 13 aa, synthetic construct
  REGION 1..13: note = Description of Artificial Sequence: Synthetic peptide
SGSSSNIGSSSVS

SEQ ID NO: 753 - protein, 13 aa, synthetic construct
  REGION 1..13: note = Description of Artificial Sequence: Synthetic peptide
SGSSSNIGSSSVS

SEQ ID NO: 754 - protein, 13 aa, synthetic construct
  REGION 1..13: note = Description of Artificial Sequence: Synthetic peptide
SGSSSNIGSSSVS

SEQ ID NO: 755 - protein, 13 aa, synthetic construct
  REGION 1..13: note = Description of Artificial Sequence: Synthetic peptide
SGSSSNIGSSSVS

SEQ ID NO: 756 - protein, 13 aa, synthetic construct
  REGION 1..13: note = Description of Artificial Sequence: Synthetic peptide
SGSSSNIGSSSVS

SEQ ID NO: 757 - protein, 13 aa, synthetic construct
  REGION 1..13: note = Description of Artificial Sequence: Synthetic peptide
SGSSSNIGSSSVS

SEQ ID NO: 758 - protein, 13 aa, synthetic construct
  REGION 1..13: note = Description of Artificial Sequence: Synthetic peptide
SGSSSNIGSSSVS

SEQ ID NO: 759 - protein, 13 aa, synthetic construct
  REGION 1..13: note = Description of Artificial Sequence: Synthetic peptide
SGSSSNIGSSSVS

SEQ ID NO: 760 - protein, 13 aa, synthetic construct
  REGION 1..13: note = Description of Artificial Sequence: Synthetic peptide
SGSSSNIGSSSVS

SEQ ID NO: 761 - protein, 13 aa, synthetic construct
  REGION 1..13: note = Description of Artificial Sequence: Synthetic peptide
SGSSSNIGSSSVS

SEQ ID NO: 762 - protein, 13 aa, synthetic construct
  REGION 1..13: note = Description of Artificial Sequence: Synthetic peptide
SGSSSNIGSSSVS

SEQ ID NO: 763 - protein, 13 aa, synthetic construct
  REGION 1..13: note = Description of Artificial Sequence: Synthetic peptide
SGSSSNIGSSSVS

SEQ ID NO: 764 - protein, 13 aa, synthetic construct
  REGION 1..13: note = Description of Artificial Sequence: Synthetic peptide
SGSSSNIGSSSVS

SEQ ID NO: 765 - protein, 13 aa, synthetic construct
  REGION 1..13: note = Description of Artificial Sequence: Synthetic peptide
SGSSSNIGSSSVS

SEQ ID NO: 766 - protein, 13 aa, synthetic construct
  REGION 1..13: note = Description of Artificial Sequence: Synthetic peptide
SGSSSNIGSSSVS

SEQ ID NO: 767 - protein, 13 aa, synthetic construct
  REGION 1..13: note = Description of Artificial Sequence: Synthetic peptide
SGSSSNIGSSSVS

SEQ ID NO: 768 - protein, 13 aa, synthetic construct
  REGION 1..13: note = Description of Artificial Sequence: Synthetic peptide
SGSSSNIGSSSVS

SEQ ID NO: 769 - protein, 13 aa, synthetic construct
  REGION 1..13: note = Description of Artificial Sequence: Synthetic peptide
SGSSSNIGSSSVS

SEQ ID NO: 770 - protein, 13 aa, synthetic construct
  REGION 1..13: note = Description of Artificial Sequence: Synthetic peptide
SGSSSNIGSSSVS

SEQ ID NO: 771 - protein, 13 aa, synthetic construct
  REGION 1..13: note = Description of Artificial Sequence: Synthetic peptide
SGSSSNIGSSSVS

SEQ ID NO: 772 - protein, 13 aa, synthetic construct
  REGION 1..13: note = Description of Artificial Sequence: Synthetic peptide
SGSSSNIGSSSVS

SEQ ID NO: 773 - protein, 13 aa, synthetic construct
  REGION 1..13: note = Description of Artificial Sequence: Synthetic peptide
SGSSSNIGSSSVS

SEQ ID NO: 774 - protein, 13 aa, synthetic construct
  REGION 1..13: note = Description of Artificial Sequence: Synthetic peptide
SGSSSNIGSSSVS

SEQ ID NO: 775 - protein, 13 aa, synthetic construct
  REGION 1..13: note = Description of Artificial Sequence: Synthetic peptide
SGSSSNIGSSSVS

SEQ ID NO: 776 - protein, 13 aa, synthetic construct
  REGION 1..13: note = Description of Artificial Sequence: Synthetic peptide
SGSSSNIGSSSVS

SEQ ID NO: 777 - protein, 13 aa, synthetic construct
  REGION 1..13: note = Description of Artificial Sequence: Synthetic peptide
SGSSSNIGSSSVS

SEQ ID NO: 778 - protein, 13 aa, synthetic construct
  REGION 1..13: note = Description of Artificial Sequence: Synthetic peptide
SGSSSNIGSSSVS

SEQ ID NO: 779 - protein, 13 aa, synthetic construct
  REGION 1..13: note = Description of Artificial Sequence: Synthetic peptide
SGSSSNIGSSSVS

SEQ ID NO: 780 - protein, 13 aa, synthetic construct
  REGION 1..13: note = Description of Artificial Sequence: Synthetic peptide
SGSSSNIGSSSVS

SEQ ID NO: 781 - protein, 13 aa, synthetic construct
  REGION 1..13: note = Description of Artificial Sequence: Synthetic peptide
SGSSSNIGSSSVS

SEQ ID NO: 782 - protein, 13 aa, synthetic construct
  REGION 1..13: note = Description of Artificial Sequence: Synthetic peptide
SGSSSNIGSSSVS

SEQ ID NO: 783 - protein, 13 aa, synthetic construct
  REGION 1..13: note = Description of Artificial Sequence: Synthetic peptide
SGSSSNIGSSSVS

SEQ ID NO: 784 - protein, 13 aa, synthetic construct
  REGION 1..13: note = Description of Artificial Sequence: Synthetic peptide
SGSSSNIGSSSVS

SEQ ID NO: 785 - protein, 13 aa, synthetic construct
  REGION 1..13: note = Description of Artificial Sequence: Synthetic peptide
SGSSSNIGSSSVS

SEQ ID NO: 786 - protein, 13 aa, synthetic construct
  REGION 1..13: note = Description of Artificial Sequence: Synthetic peptide
SGSSSNIGSSSVS

SEQ ID NO: 787 - protein, 13 aa, synthetic construct
  REGION 1..13: note = Description of Artificial Sequence: Synthetic peptide
SGSSSNIGSSSVS

SEQ ID NO: 788 - protein, 13 aa, synthetic construct
  REGION 1..13: note = Description of Artificial Sequence: Synthetic peptide
SGSSSNIGSSSVS

SEQ ID NO: 789 - protein, 13 aa, synthetic construct
  REGION 1..13: note = Description of Artificial Sequence: Synthetic peptide
SGSSSNIGSSSVS

SEQ ID NO: 790 - protein, 13 aa, synthetic construct
  REGION 1..13: note = Description of Artificial Sequence: Synthetic peptide
SGSSSNIGSSSVS

SEQ ID NO: 791 - protein, 13 aa, synthetic construct
  REGION 1..13: note = Description of Artificial Sequence: Synthetic peptide
SGSSSNIGSSSVS

SEQ ID NO: 792 - protein, 13 aa, synthetic construct
  REGION 1..13: note = Description of Artificial Sequence: Synthetic peptide
SGSSSNIGSSSVS

SEQ ID NO: 793 - protein, 13 aa, synthetic construct
  REGION 1..13: note = Description of Artificial Sequence: Synthetic peptide
SGSSSNIGSSSVS

SEQ ID NO: 794 - protein, 13 aa, synthetic construct
  REGION 1..13: note = Description of Artificial Sequence: Synthetic peptide
SGSSSNIGSSSVS

SEQ ID NO: 795 - protein, 13 aa, synthetic construct
  REGION 1..13: note = Description of Artificial Sequence: Synthetic peptide
SGSSSNIGSSSVS

SEQ ID NO: 796 - protein, 13 aa, synthetic construct
  REGION 1..13: note = Description of Artificial Sequence: Synthetic peptide
SGSSSNIGSSSVS

SEQ ID NO: 797 - protein, 13 aa, synthetic construct
  REGION 1..13: note = Description of Artificial Sequence: Synthetic peptide
SGSSSNIGSSSVS

SEQ ID NO: 798 - protein, 13 aa, synthetic construct
  REGION 1..13: note = Description of Artificial Sequence: Synthetic peptide
SGSSSNIGSSSVS

SEQ ID NO: 799 - protein, 13 aa, synthetic construct
  REGION 1..13: note = Description of Artificial Sequence: Synthetic peptide
SGSSSNIGSSSVS

SEQ ID NO: 800 - protein, 13 aa, synthetic construct
  REGION 1..13: note = Description of Artificial Sequence: Synthetic peptide
SGSSSNIGSSSVS

SEQ ID NO: 801 - protein, 13 aa, synthetic construct
  REGION 1..13: note = Description of Artificial Sequence: Synthetic peptide
SGSSSNIGSSSVS

SEQ ID NO: 802 - protein, 13 aa, synthetic construct
  REGION 1..13: note = Description of Artificial Sequence: Synthetic peptide
SGSSSNIGSSSVS

SEQ ID NO: 803 - protein, 13 aa, synthetic construct
  REGION 1..13: note = Description of Artificial Sequence: Synthetic peptide
SGSSSNIGSSSVS

SEQ ID NO: 804 - protein, 13 aa, synthetic construct
  REGION 1..13: note = Description of Artificial Sequence: Synthetic peptide
SGSSSNIGSSSVS

SEQ ID NO: 805 - protein, 13 aa, synthetic construct
  REGION 1..13: note = Description of Artificial Sequence: Synthetic peptide
SGSSSNIGSSSVS

SEQ ID NO: 806 - protein, 13 aa, synthetic construct
  REGION 1..13: note = Description of Artificial Sequence: Synthetic peptide
SGSSSNIGSSSVS

SEQ ID NO: 807 - protein, 13 aa, synthetic construct
  REGION 1..13: note = Description of Artificial Sequence: Synthetic peptide
SGSSSNIGSSSVS

SEQ ID NO: 808 - protein, 13 aa, synthetic construct
  REGION 1..13: note = Description of Artificial Sequence: Synthetic peptide
SGSSSNIGSSSVS

SEQ ID NO: 809 - protein, 13 aa, synthetic construct
  REGION 1..13: note = Description of Artificial Sequence: Synthetic peptide
SGSSSNIGSSSVS

SEQ ID NO: 810 - protein, 13 aa, synthetic construct
  REGION 1..13: note = Description of Artificial Sequence: Synthetic peptide
SGSSSNIGSSSVS

SEQ ID NO: 811 - protein, 13 aa, synthetic construct
  REGION 1..13: note = Description of Artificial Sequence: Synthetic peptide
SGSSSNIGSSSVS

SEQ ID NO: 812 - protein, 13 aa, synthetic construct
  REGION 1..13: note = Description of Artificial Sequence: Synthetic peptide
SGSSSNIGSSSVS

SEQ ID NO: 813 - protein, 13 aa, synthetic construct
  REGION 1..13: note = Description of Artificial Sequence: Synthetic peptide
SGSSSNIGSSSVS

SEQ ID NO: 814 - protein, 13 aa, synthetic construct
  REGION 1..13: note = Description of Artificial Sequence: Synthetic peptide
SGSSSNIGSSSVS

SEQ ID NO: 815 - protein, 13 aa, synthetic construct
  REGION 1..13: note = Description of Artificial Sequence: Synthetic peptide
SGSSSNIGSSSVS

SEQ ID NO: 816 - protein, 13 aa, synthetic construct
  REGION 1..13: note = Description of Artificial Sequence: Synthetic peptide
SGSSSNIGSSSVS

SEQ ID NO: 817 - protein, 13 aa, synthetic construct
  REGION 1..13: note = Description of Artificial Sequence: Synthetic peptide
SGSSSNIGSSSVS

SEQ ID NO: 818 - protein, 13 aa, synthetic construct
  REGION 1..13: note = Description of Artificial Sequence: Synthetic peptide
SGSSSNIGSSSVS

SEQ ID NO: 819 - protein, 13 aa, synthetic construct
  REGION 1..13: note = Description of Artificial Sequence: Synthetic peptide
SGSSSNIGSSSVS

SEQ ID NO: 820 - protein, 13 aa, synthetic construct
  REGION 1..13: note = Description of Artificial Sequence: Synthetic peptide
SGSSSNIGSSSVS

SEQ ID NO: 821 - protein, 13 aa, synthetic construct
  REGION 1..13: note = Description of Artificial Sequence: Synthetic peptide
SGSSSNIGSSSVS

SEQ ID NO: 822 - protein, 13 aa, synthetic construct
  REGION 1..13: note = Description of Artificial Sequence: Synthetic peptide
SGSSSNIGSSSVS

SEQ ID NO: 823 - protein, 13 aa, synthetic construct
  REGION 1..13: note = Description of Artificial Sequence: Synthetic peptide
SGSSSNIGSSSVS

SEQ ID NO: 824 - protein, 13 aa, synthetic construct
  REGION 1..13: note = Description of Artificial Sequence: Synthetic peptide
SGSSSNIGSSSVS

SEQ ID NO: 825 - protein, 13 aa, synthetic construct
  REGION 1..13: note = Description of Artificial Sequence: Synthetic peptide
SGSSSNIGSSSVS

SEQ ID NO: 826 - protein, 13 aa, synthetic construct
  REGION 1..13: note = Description of Artificial Sequence: Synthetic peptide
SGSSSNIGSSSVS

SEQ ID NO: 827 - protein, 13 aa, synthetic construct
  REGION 1..13: note = Description of Artificial Sequence: Synthetic peptide
SGSSSNIGSSSVS

SEQ ID NO: 828 - protein, 13 aa, synthetic construct
  REGION 1..13: note = Description of Artificial Sequence: Synthetic peptide
SGSSSNIGSSSVS

SEQ ID NO: 829 - protein, 13 aa, synthetic construct
  REGION 1..13: note = Description of Artificial Sequence: Synthetic peptide
SGSSSNIGSSSVS

SEQ ID NO: 830 - protein, 13 aa, synthetic construct
  REGION 1..13: note = Description of Artificial Sequence: Synthetic peptide
SGSSSNIGSSSVS

SEQ ID NO: 831 - protein, 13 aa, synthetic construct
  REGION 1..13: note = Description of Artificial Sequence: Synthetic peptide
SGSSSNIGSSSVS

SEQ ID NO: 832 - protein, 13 aa, synthetic construct
  REGION 1..13: note = Description of Artificial Sequence: Synthetic peptide
SGSSSNIGSSSVS

SEQ ID NO: 833 - protein, 13 aa, synthetic construct
  REGION 1..13: note = Description of Artificial Sequence: Synthetic peptide
SGSSSNIGSSSVS

SEQ ID NO: 834 - protein, 13 aa, synthetic construct
  REGION 1..13: note = Description of Artificial Sequence: Synthetic peptide
SGSSSNIGSSSVS

SEQ ID NO: 835 - protein, 13 aa, synthetic construct
  REGION 1..13: note = Description of Artificial Sequence: Synthetic peptide
SGSSSNIGSSSVS

SEQ ID NO: 836 - protein, 13 aa, synthetic construct
  REGION 1..13: note = Description of Artificial Sequence: Synthetic peptide
SGSSSNIGSSSVS

SEQ ID NO: 837 - protein, 13 aa, synthetic construct
  REGION 1..13: note = Description of Artificial Sequence: Synthetic peptide
TGSSSNIGSSSVS

SEQ ID NO: 838 - protein, 13 aa, synthetic construct
  REGION 1..13: note = Description of Artificial Sequence: Synthetic peptide
SGSSTNIGSSSVS

SEQ ID NO: 839 - protein, 13 aa, synthetic construct
  REGION 1..13: note = Description of Artificial Sequence: Synthetic peptide
SGSSSNIGSSSVS

SEQ ID NO: 840 - protein, 13 aa, synthetic construct
  REGION 1..13: note = Description of Artificial Sequence: Synthetic peptide
TGSSSNIGSSSVS

SEQ ID NO: 841 - protein, 13 aa, synthetic construct
  REGION 1..13: note = Description of Artificial Sequence: Synthetic peptide
SGASSNIGSSSVS

SEQ ID NO: 842 - protein, 13 aa, synthetic construct
  REGION 1..13: note = Description of Artificial Sequence: Synthetic peptide
SGSPSNIGSSSVS

SEQ ID NO: 843 - protein, 13 aa, synthetic construct
  REGION 1..13: note = Description of Artificial Sequence: Synthetic peptide
SGSKSNIGSSSVS

SEQ ID NO: 844 - protein, 13 aa, synthetic construct
  REGION 1..13: note = Description of Artificial Sequence: Synthetic peptide
SGSSTNIGSSSVS

SEQ ID NO: 845 - protein, 13 aa, synthetic construct
  REGION 1..13: note = Description of Artificial Sequence: Synthetic peptide
SGSSSDIGSSSVS

SEQ ID NO: 846 - protein, 13 aa, synthetic construct
  REGION 1..13: note = Description of Artificial Sequence: Synthetic peptide
SGSSSNIQSSSVS

SEQ ID NO: 847 - protein, 13 aa, synthetic construct
  REGION 1..13: note = Description of Artificial Sequence: Synthetic peptide
SGSSSNIGHSSVS

SEQ ID NO: 848 - protein, 13 aa, synthetic construct
  REGION 1..13: note = Description of Artificial Sequence: Synthetic peptide
SGSSSNIGSTSVS

SEQ ID NO: 849 - protein, 13 aa, synthetic construct
  REGION 1..13: note = Description of Artificial Sequence: Synthetic peptide
SGSSSNIGSNSVS

SEQ ID NO: 850 - protein, 13 aa, synthetic construct
  REGION 1..13: note = Description of Artificial Sequence: Synthetic peptide
SGSSSNIGSASVS

SEQ ID NO: 851 - protein, 13 aa, synthetic construct
  REGION 1..13: note = Description of Artificial Sequence: Synthetic peptide
SGSSSNIGSSTVS

SEQ ID NO: 852 - protein, 13 aa, synthetic construct
  REGION 1..13: note = Description of Artificial Sequence: Synthetic peptide
SGSSSNIGSSAVS

SEQ ID NO: 853 - protein, 13 aa, synthetic construct
  REGION 1..13: note = Description of Artificial Sequence: Synthetic peptide
SGSSSNIGSSYVS

SEQ ID NO: 854 - protein, 13 aa, synthetic construct
  REGION 1..13: note = Description of Artificial Sequence: Synthetic peptide
SGSSSNIGSSSTS

SEQ ID NO: 855 - protein, 13 aa, synthetic construct
  REGION 1..13: note = Description of Artificial Sequence: Synthetic peptide
SGSSSNIGSSSVA

SEQ ID NO: 856 - protein, 13 aa, synthetic construct
  REGION 1..13: note = Description of Artificial Sequence: Synthetic peptide
SGSSSNIGSSSVT

SEQ ID NO: 857 - protein, 13 aa, synthetic construct
  REGION 1..13: note = Description of Artificial Sequence: Synthetic peptide
SGSSSNIGSSSVS

SEQ ID NO: 858 - protein, 13 aa, synthetic construct
  REGION 1..13: note = Description of Artificial Sequence: Synthetic peptide
SGSSSNIGSSSVS

SEQ ID NO: 859 - protein, 13 aa, synthetic construct
  REGION 1..13: note = Description of Artificial Sequence: Synthetic peptide
SGSSSNIGSSSVS

SEQ ID NO: 860 - protein, 13 aa, synthetic construct
  REGION 1..13: note = Description of Artificial Sequence: Synthetic peptide
SGSSSNIGSSSVS

SEQ ID NO: 861 - protein, 13 aa, synthetic construct
  REGION 1..13: note = Description of Artificial Sequence: Synthetic peptide
SGSSSNIGSSSVS

SEQ ID NO: 862 - protein, 13 aa, synthetic construct
  REGION 1..13: note = Description of Artificial Sequence: Synthetic peptide
SGSSSNIGSSSVS

SEQ ID NO: 863 - protein, 13 aa, synthetic construct
  REGION 1..13: note = Description of Artificial Sequence: Synthetic peptide
SGSSSNIGSSSVS

SEQ ID NO: 864 - protein, 13 aa, synthetic construct
  REGION 1..13: note = Description of Artificial Sequence: Synthetic peptide
SGSSSNIGSSSVS

SEQ ID NO: 865 - protein, 13 aa, synthetic construct
  REGION 1..13: note = Description of Artificial Sequence: Synthetic peptide
SGSSSNIGSSSVS

SEQ ID NO: 866 - protein, 13 aa, synthetic construct
  REGION 1..13: note = Description of Artificial Sequence: Synthetic peptide
SGSSSNIGSSSVS

SEQ ID NO: 867 - protein, 13 aa, synthetic construct
  REGION 1..13: note = Description of Artificial Sequence: Synthetic peptide
SGSSSNIGSSSVS

SEQ ID NO: 868 - protein, 13 aa, synthetic construct
  REGION 1..13: note = Description of Artificial Sequence: Synthetic peptide
SGSSSNIGSSSVS

SEQ ID NO: 869 - protein, 13 aa, synthetic construct
  REGION 1..13: note = Description of Artificial Sequence: Synthetic peptide
SGSSSNIGSSSVS

SEQ ID NO: 870 - protein, 13 aa, synthetic construct
  REGION 1..13: note = Description of Artificial Sequence: Synthetic peptide
SGSSSNIGSSSVS

SEQ ID NO: 871 - protein, 13 aa, synthetic construct
  REGION 1..13: note = Description of Artificial Sequence: Synthetic peptide
SGSSSNIGSSSVS

SEQ ID NO: 872 - protein, 13 aa, synthetic construct
  REGION 1..13: note = Description of Artificial Sequence: Synthetic peptide
SGSSSNIGSSSVS

SEQ ID NO: 873 - protein, 13 aa, synthetic construct
  REGION 1..13: note = Description of Artificial Sequence: Synthetic peptide
SGSSSNIGSSSVS

SEQ ID NO: 874 - protein, 13 aa, synthetic construct
  REGION 1..13: note = Description of Artificial Sequence: Synthetic peptide
SGSSSNIGSSSVS

SEQ ID NO: 875 - protein, 13 aa, synthetic construct
  REGION 1..13: note = Description of Artificial Sequence: Synthetic peptide
SGSSSNIGSSSVS

SEQ ID NO: 876 - protein, 13 aa, synthetic construct
  REGION 1..13: note = Description of Artificial Sequence: Synthetic peptide
SGSSSNIGSSSVS

SEQ ID NO: 877 - protein, 13 aa, synthetic construct
  REGION 1..13: note = Description of Artificial Sequence: Synthetic peptide
SGSSSNIGSSSVS

SEQ ID NO: 878 - protein, 13 aa, synthetic construct
  REGION 1..13: note = Description of Artificial Sequence: Synthetic peptide
SGSSSNIGSSSVS

SEQ ID NO: 879 - protein, 13 aa, synthetic construct
  REGION 1..13: note = Description of Artificial Sequence: Synthetic peptide
SGSSSNIGSSSVS

SEQ ID NO: 880 - protein, 13 aa, synthetic construct
  REGION 1..13: note = Description of Artificial Sequence: Synthetic peptide
SGSSSNIGSSSVS

SEQ ID NO: 881 - protein, 13 aa, synthetic construct
  REGION 1..13: note = Description of Artificial Sequence: Synthetic peptide
SGSSSNIGSSSVS

SEQ ID NO: 882 - protein, 13 aa, synthetic construct
  REGION 1..13: note = Description of Artificial Sequence: Synthetic peptide
SGSSSNIGSSSVS

SEQ ID NO: 883 - protein, 13 aa, synthetic construct
  REGION 1..13: note = Description of Artificial Sequence: Synthetic peptide
SGSSSNIGSSSVS

SEQ ID NO: 884 - protein, 13 aa, synthetic construct
  REGION 1..13: note = Description of Artificial Sequence: Synthetic peptide
SGSSSNIGSSSVS

SEQ ID NO: 885 - protein, 13 aa, synthetic construct
  REGION 1..13: note = Description of Artificial Sequence: Synthetic peptide
SGSSSNIGSSSVS

SEQ ID NO: 886 - protein, 13 aa, synthetic construct
  REGION 1..13: note = Description of Artificial Sequence: Synthetic peptide
SGSSSNIGSSSVS

SEQ ID NO: 887 - protein, 13 aa, synthetic construct
  REGION 1..13: note = Description of Artificial Sequence: Synthetic peptide
SGSSSNIGSSSVS

SEQ ID NO: 888 - protein, 13 aa, synthetic construct
  REGION 1..13: note = Description of Artificial Sequence: Synthetic peptide
SGSSSNIGSSSVS

SEQ ID NO: 889 - protein, 13 aa, synthetic construct
  REGION 1..13: note = Description of Artificial Sequence: Synthetic peptide
SGSSSDIGSSSVS

SEQ ID NO: 890 - protein, 13 aa, synthetic construct
  REGION 1..13: note = Description of Artificial Sequence: Synthetic peptide
HGSESDIGSHDVL

SEQ ID NO: 891 - protein, 13 aa, synthetic construct
  REGION 1..13: note = Description of Artificial Sequence: Synthetic peptide
SGSSSNIGSSSVS

SEQ ID NO: 892 - protein, 13 aa, synthetic construct
  REGION 1..13: note = Description of Artificial Sequence: Synthetic peptide
SGSSSNIGSSSVS

SEQ ID NO: 893 - protein, 13 aa, synthetic construct
  REGION 1..13: note = Description of Artificial Sequence: Synthetic peptide
SGSSSNIGSSSVS

SEQ ID NO: 894 - protein, 13 aa, synthetic construct
  REGION 1..13: note = Description of Artificial Sequence: Synthetic peptide
SGSSSNIGSSSVS

SEQ ID NO: 895 - protein, 13 aa, synthetic construct
  REGION 1..13: note = Description of Artificial Sequence: Synthetic peptide
SGSSSNIGSSSVS

SEQ ID NO: 896 - protein, 13 aa, synthetic construct
  REGION 1..13: note = Description of Artificial Sequence: Synthetic peptide
SGSSSNIGSSSVS

SEQ ID NO: 897 - protein, 13 aa, synthetic construct
  REGION 1..13: note = Description of Artificial Sequence: Synthetic peptide
SGSSSNIGSSSVS

SEQ ID NO: 898 - protein, 13 aa, synthetic construct
  REGION 1..13: note = Description of Artificial Sequence: Synthetic peptide
SGSSSNIGSSSVS

SEQ ID NO: 899 - protein, 13 aa, synthetic construct
  REGION 1..13: note = Description of Artificial Sequence: Synthetic peptide
SGSSSNIGSSSVS

SEQ ID NO: 900 - protein, 13 aa, synthetic construct
  REGION 1..13: note = Description of Artificial Sequence: Synthetic peptide
SGSSSNIGSSSVS

SEQ ID NO: 901 - protein, 13 aa, synthetic construct
  REGION 1..13: note = Description of Artificial Sequence: Synthetic peptide
SGSSSNIGSSSVS

SEQ ID NO: 902 - protein, 13 aa, synthetic construct
  REGION 1..13: note = Description of Artificial Sequence: Synthetic peptide
SGSSSNIGSSSVS

SEQ ID NO: 903 - protein, 13 aa, synthetic construct
  REGION 1..13: note = Description of Artificial Sequence: Synthetic peptide
SGSSSNIGSSSVS

SEQ ID NO: 904 - protein, 13 aa, synthetic construct
  REGION 1..13: note = Description of Artificial Sequence: Synthetic peptide
SGSSSNIGSSSVS

SEQ ID NO: 905 - protein, 13 aa, synthetic construct
  REGION 1..13: note = Description of Artificial Sequence: Synthetic peptide
SGSSSNIGSSSVS

SEQ ID NO: 906 - protein, 13 aa, synthetic construct
  REGION 1..13: note = Description of Artificial Sequence: Synthetic peptide
SGSSSNIGSSSVS

SEQ ID NO: 907 - protein, 13 aa, synthetic construct
  REGION 1..13: note = Description of Artificial Sequence: Synthetic peptide
SGSSSNIGSSSVS

SEQ ID NO: 908 - protein, 13 aa, synthetic construct
  REGION 1..13: note = Description of Artificial Sequence: Synthetic peptide
SGSSSNIGSSSVS

SEQ ID NO: 909 - protein, 13 aa, synthetic construct
  REGION 1..13: note = Description of Artificial Sequence: Synthetic peptide
SGSSSNIGSSSVS

SEQ ID NO: 910 - protein, 13 aa, synthetic construct
  REGION 1..13: note = Description of Artificial Sequence: Synthetic peptide
SGSSSNIGSSSVS

SEQ ID NO: 911 - protein, 13 aa, synthetic construct
  REGION 1..13: note = Description of Artificial Sequence: Synthetic peptide
SGSSSNIGSSSVS

SEQ ID NO: 912 - protein, 13 aa, synthetic construct
  REGION 1..13: note = Description of Artificial Sequence: Synthetic peptide
SGSSSNIGSSSVS

SEQ ID NO: 913 - protein, 13 aa, synthetic construct
  REGION 1..13: note = Description of Artificial Sequence: Synthetic peptide
SGSSSNIGSSSVS

SEQ ID NO: 914 - protein, 13 aa, synthetic construct
  REGION 1..13: note = Description of Artificial Sequence: Synthetic peptide
SGSSSNIGSSSVS

SEQ ID NO: 915 - protein, 13 aa, synthetic construct
  REGION 1..13: note = Description of Artificial Sequence: Synthetic peptide
SGSSSNIGSSSVS

SEQ ID NO: 916 - protein, 13 aa, synthetic construct
  REGION 1..13: note = Description of Artificial Sequence: Synthetic peptide
SGSSSNIGSSSVS

SEQ ID NO: 917 - protein, 13 aa, synthetic construct
  REGION 1..13: note = Description of Artificial Sequence: Synthetic peptide
SGSSSNIGSSSVS

SEQ ID NO: 918 - protein, 13 aa, synthetic construct
  REGION 1..13: note = Description of Artificial Sequence: Synthetic peptide
SGSSSNIGSSSVS

SEQ ID NO: 919 - protein, 13 aa, synthetic construct
  REGION 1..13: note = Description of Artificial Sequence: Synthetic peptide
SGSSSNIGSSSVS

SEQ ID NO: 920 - protein, 13 aa, synthetic construct
  REGION 1..13: note = Description of Artificial Sequence: Synthetic peptide
SGSSSNIGSSSVS

SEQ ID NO: 921 - protein, 13 aa, synthetic construct
  REGION 1..13: note = Description of Artificial Sequence: Synthetic peptide
SGSSSNIGSSSVS

SEQ ID NO: 922 - protein, 13 aa, synthetic construct
  REGION 1..13: note = Description of Artificial Sequence: Synthetic peptide
SGSSSNIGSSSVS

SEQ ID NO: 923 - protein, 13 aa, synthetic construct
  REGION 1..13: note = Description of Artificial Sequence: Synthetic peptide
SGSSSNIGSSSVS

SEQ ID NO: 924 - protein, 13 aa, synthetic construct
  REGION 1..13: note = Description of Artificial Sequence: Synthetic peptide
SGSSSNIGSSSVS

SEQ ID NO: 925 - protein, 13 aa, synthetic construct
  REGION 1..13: note = Description of Artificial Sequence: Synthetic peptide
SGSSSNIGSSSVS

SEQ ID NO: 926 - protein, 13 aa, synthetic construct
  REGION 1..13: note = Description of Artificial Sequence: Synthetic peptide
SGSSSNIGSSSVS

SEQ ID NO: 927 - protein, 13 aa, synthetic construct
  REGION 1..13: note = Description of Artificial Sequence: Synthetic peptide
SGSSSNIGSSSVS

SEQ ID NO: 928 - protein, 13 aa, synthetic construct
  REGION 1..13: note = Description of Artificial Sequence: Synthetic peptide
SGSSTNIGSSSVY

SEQ ID NO: 929 - protein, 13 aa, synthetic construct
  REGION 1..13: note = Description of Artificial Sequence: Synthetic peptide
SGSSTNIGSSSVY

SEQ ID NO: 930 - protein, 13 aa, synthetic construct
  REGION 1..13: note = Description of Artificial Sequence: Synthetic peptide
TGSSSNIGSSYVS

SEQ ID NO: 931 - protein, 13 aa, synthetic construct
  REGION 1..13: note = Description of Artificial Sequence: Synthetic peptide
TGSSSNIGSSYVS

SEQ ID NO: 932 - protein, 13 aa, synthetic construct
  REGION 1..13: note = Description of Artificial Sequence: Synthetic peptide
TGSSSNIGSSYVS

SEQ ID NO: 933 - protein, 13 aa, synthetic construct
  REGION 1..13: note = Description of Artificial Sequence: Synthetic peptide
TGSSSNIGSSYVS

SEQ ID NO: 934 - protein, 13 aa, synthetic construct
  REGION 1..13: note = Description of Artificial Sequence: Synthetic peptide
SGSPSNIGSASTS

SEQ ID NO: 935 - protein, 13 aa, synthetic construct
  REGION 1..13: note = Description of Artificial Sequence: Synthetic peptide
SGSPSNIGSASTS

SEQ ID NO: 936 - protein, 13 aa, synthetic construct
  REGION 1..13: note = Description of Artificial Sequence: Synthetic peptide
SGSPSNIGSASTS

SEQ ID NO: 937 - protein, 13 aa, synthetic construct
  REGION 1..13: note = Description of Artificial Sequence: Synthetic peptide
SGSPSNIGSASTS

SEQ ID NO: 938 - protein, 13 aa, synthetic construct
  REGION 1..13: note = Description of Artificial Sequence: Synthetic peptide
SGSPSNIGSASTS

SEQ ID NO: 939 - protein, 13 aa, synthetic construct
  REGION 1..13: note = Description of Artificial Sequence: Synthetic peptide
SGASSNIGHSSVY

SEQ ID NO: 940 - protein, 13 aa, synthetic construct
  REGION 1..13: note = Description of Artificial Sequence: Synthetic peptide
SGSSSNIGSSSVS

SEQ ID NO: 941 - protein, 13 aa, synthetic construct
  REGION 1..13: note = Description of Artificial Sequence: Synthetic peptide
SGSSSNIGSSSVS

SEQ ID NO: 942 - protein, 13 aa, synthetic construct
  REGION 1..13: note = Description of Artificial Sequence: Synthetic peptide
SGSSSNIGSSSVT

SEQ ID NO: 943 - protein, 13 aa, synthetic construct
  REGION 1..13: note = Description of Artificial Sequence: Synthetic peptide
SGSKSNIGSSYVS

SEQ ID NO: 944 - protein, 13 aa, synthetic construct
  REGION 1..13: note = Description of Artificial Sequence: Synthetic peptide
SGSSSNIGSSSVY

SEQ ID NO: 945 - protein, 7 aa, synthetic construct
  REGION 1..7: note = Description of Artificial Sequence: Synthetic peptide
KNNQRPS

SEQ ID NO: 946 - protein, 7 aa, synthetic construct
  REGION 1..7: note = Description of Artificial Sequence: Synthetic peptide
KNNQRPS

SEQ ID NO: 947 - protein, 7 aa, synthetic construct
  REGION 1..7: note = Description of Artificial Sequence: Synthetic peptide
KNNQRPS

SEQ ID NO: 948 - protein, 7 aa, synthetic construct
  REGION 1..7: note = Description of Artificial Sequence: Synthetic peptide
KNNQRPS

SEQ ID NO: 949 - protein, 7 aa, synthetic construct
  REGION 1..7: note = Description of Artificial Sequence: Synthetic peptide
KNNQRPS

SEQ ID NO: 950 - protein, 7 aa, synthetic construct
  REGION 1..7: note = Description of Artificial Sequence: Synthetic peptide
KNNQRPS

SEQ ID NO: 951 - protein, 7 aa, synthetic construct
  REGION 1..7: note = Description of Artificial Sequence: Synthetic peptide
KNNQRPS

SEQ ID NO: 952 - protein, 7 aa, synthetic construct
  REGION 1..7: note = Description of Artificial Sequence: Synthetic peptide
KNNQRPS

SEQ ID NO: 953 - protein, 7 aa, synthetic construct
  REGION 1..7: note = Description of Artificial Sequence: Synthetic peptide
KNNQRPS

SEQ ID NO: 954 - protein, 7 aa, synthetic construct
  REGION 1..7: note = Description of Artificial Sequence: Synthetic peptide
KNNQRPS

SEQ ID NO: 955 - protein, 7 aa, synthetic construct
  REGION 1..7: note = Description of Artificial Sequence: Synthetic peptide
KNNQRPS

SEQ ID NO: 956 - protein, 7 aa, synthetic construct
  REGION 1..7: note = Description of Artificial Sequence: Synthetic peptide
KNNQRPS

SEQ ID NO: 957 - protein, 7 aa, synthetic construct
  REGION 1..7: note = Description of Artificial Sequence: Synthetic peptide
KNNQRPS

SEQ ID NO: 958 - protein, 7 aa, synthetic construct
  REGION 1..7: note = Description of Artificial Sequence: Synthetic peptide
KNNQRPS

SEQ ID NO: 959 - protein, 7 aa, synthetic construct
  REGION 1..7: note = Description of Artificial Sequence: Synthetic peptide
KNNQRPS

SEQ ID NO: 960 - protein, 7 aa, synthetic construct
  REGION 1..7: note = Description of Artificial Sequence: Synthetic peptide
KNNQRPS

SEQ ID NO: 961 - protein, 7 aa, synthetic construct
  REGION 1..7: note = Description of Artificial Sequence: Synthetic peptide
KNNQRPS

SEQ ID NO: 962 - protein, 7 aa, synthetic construct
  REGION 1..7: note = Description of Artificial Sequence: Synthetic peptide
KNNQRPS

SEQ ID NO: 963 - protein, 7 aa, synthetic construct
  REGION 1..7: note = Description of Artificial Sequence: Synthetic peptide
KNNQRPS

SEQ ID NO: 964 - protein, 7 aa, synthetic construct
  REGION 1..7: note = Description of Artificial Sequence: Synthetic peptide
KNNQRPS

SEQ ID NO: 965 - protein, 7 aa, synthetic construct
  REGION 1..7: note = Description of Artificial Sequence: Synthetic peptide
KNNQRPS

SEQ ID NO: 966 - protein, 7 aa, synthetic construct
  REGION 1..7: note = Description of Artificial Sequence: Synthetic peptide
KNNQRPS

SEQ ID NO: 967 - protein, 7 aa, synthetic construct
  REGION 1..7: note = Description of Artificial Sequence: Synthetic peptide
KNNQRPS

SEQ ID NO: 968 - protein, 7 aa, synthetic construct
  REGION 1..7: note = Description of Artificial Sequence: Synthetic peptide
KNNQRPS

SEQ ID NO: 969 - protein, 7 aa, synthetic construct
  REGION 1..7: note = Description of Artificial Sequence: Synthetic peptide
KNNQRPS

SEQ ID NO: 970 - protein, 7 aa, synthetic construct
  REGION 1..7: note = Description of Artificial Sequence: Synthetic peptide
KNNQRPS

SEQ ID NO: 971 - protein, 7 aa, synthetic construct
  REGION 1..7: note = Description of Artificial Sequence: Synthetic peptide
KNNQRPS

SEQ ID NO: 972 - protein, 7 aa, synthetic construct
  REGION 1..7: note = Description of Artificial Sequence: Synthetic peptide
KNNQRPS

SEQ ID NO: 973 - protein, 7 aa, synthetic construct
  REGION 1..7: note = Description of Artificial Sequence: Synthetic peptide
KNNQRPS

SEQ ID NO: 974 - protein, 7 aa, synthetic construct
  REGION 1..7: note = Description of Artificial Sequence: Synthetic peptide
KNNQRPS

SEQ ID NO: 975 - protein, 7 aa, synthetic construct
  REGION 1..7: note = Description of Artificial Sequence: Synthetic peptide
KNNQRPS

SEQ ID NO: 976 - protein, 7 aa, synthetic construct
  REGION 1..7: note = Description of Artificial Sequence: Synthetic peptide
KNNQRPS

SEQ ID NO: 977 - protein, 7 aa, synthetic construct
  REGION 1..7: note = Description of Artificial Sequence: Synthetic peptide
KNNQRPS

SEQ ID NO: 978 - protein, 7 aa, synthetic construct
  REGION 1..7: note = Description of Artificial Sequence: Synthetic peptide
KNNQRPS

SEQ ID NO: 979 - protein, 7 aa, synthetic construct
  REGION 1..7: note = Description of Artificial Sequence: Synthetic peptide
KNNQRPS

SEQ ID NO: 980 - protein, 7 aa, synthetic construct
  REGION 1..7: note = Description of Artificial Sequence: Synthetic peptide
KNNQRPS

SEQ ID NO: 981 - protein, 7 aa, synthetic construct
  REGION 1..7: note = Description of Artificial Sequence: Synthetic peptide
KNNQRPS

SEQ ID NO: 982 - protein, 7 aa, synthetic construct
  REGION 1..7: note = Description of Artificial Sequence: Synthetic peptide
KNNQRPS

SEQ ID NO: 983 - protein, 7 aa, synthetic construct
  REGION 1..7: note = Description of Artificial Sequence: Synthetic peptide
KNNQRPS

SEQ ID NO: 984 - protein, 7 aa, synthetic construct
  REGION 1..7: note = Description of Artificial Sequence: Synthetic peptide
KNNQRPS

SEQ ID NO: 985 - protein, 7 aa, synthetic construct
  REGION 1..7: note = Description of Artificial Sequence: Synthetic peptide
KNNQRPS

SEQ ID NO: 986 - protein, 7 aa, synthetic construct
  REGION 1..7: note = Description of Artificial Sequence: Synthetic peptide
KNNQRPS

SEQ ID NO: 987 - protein, 7 aa, synthetic construct
  REGION 1..7: note = Description of Artificial Sequence: Synthetic peptide
KNNQRPS

SEQ ID NO: 988 - protein, 7 aa, synthetic construct
  REGION 1..7: note = Description of Artificial Sequence: Synthetic peptide
KNNQRPS

SEQ ID NO: 989 - protein, 7 aa, synthetic construct
  REGION 1..7: note = Description of Artificial Sequence: Synthetic peptide
KNNQRPS

SEQ ID NO: 990 - protein, 7 aa, synthetic construct
  REGION 1..7: note = Description of Artificial Sequence: Synthetic peptide
KNNQRPS

SEQ ID NO: 991 - protein, 7 aa, synthetic construct
  REGION 1..7: note = Description of Artificial Sequence: Synthetic peptide
KNNQRPS

SEQ ID NO: 992 - protein, 7 aa, synthetic construct
  REGION 1..7: note = Description of Artificial Sequence: Synthetic peptide
KNNQRPS

SEQ ID NO: 993 - protein, 7 aa, synthetic construct
  REGION 1..7: note = Description of Artificial Sequence: Synthetic peptide
KNNQRPS

SEQ ID NO: 994 - protein, 7 aa, synthetic construct
  REGION 1..7: note = Description of Artificial Sequence: Synthetic peptide
KNNQRPS

SEQ ID NO: 995 - protein, 7 aa, synthetic construct
  REGION 1..7: note = Description of Artificial Sequence: Synthetic peptide
KNNQRPS

SEQ ID NO: 996 - protein, 7 aa, synthetic construct
  REGION 1..7: note = Description of Artificial Sequence: Synthetic peptide
KNNQRPS

SEQ ID NO: 997 - protein, 7 aa, synthetic construct
  REGION 1..7: note = Description of Artificial Sequence: Synthetic peptide
KNNQRPS

SEQ ID NO: 998 - protein, 7 aa, synthetic construct
  REGION 1..7: note = Description of Artificial Sequence: Synthetic peptide
KNNQRPS

SEQ ID NO: 999 - protein, 7 aa, synthetic construct
  REGION 1..7: note = Description of Artificial Sequence: Synthetic peptide
KNNQRPS

SEQ ID NO: 1000 - protein, 7 aa, synthetic construct
  REGION 1..7: note = Description of Artificial Sequence: Synthetic peptide
KNNQRPS

SEQ ID NO: 1001 - protein, 7 aa, synthetic construct
  REGION 1..7: note = Description of Artificial Sequence: Synthetic peptide
KNNQRPS

SEQ ID NO: 1002 - protein, 7 aa, synthetic construct
  REGION 1..7: note = Description of Artificial Sequence: Synthetic peptide
KNNQRPS

SEQ ID NO: 1003 - protein, 7 aa, synthetic construct
  REGION 1..7: note = Description of Artificial Sequence: Synthetic peptide
KNNQRPS

SEQ ID NO: 1004 - protein, 7 aa, synthetic construct
  REGION 1..7: note = Description of Artificial Sequence: Synthetic peptide
KNNQRPS

SEQ ID NO: 1005 - protein, 7 aa, synthetic construct
  REGION 1..7: note = Description of Artificial Sequence: Synthetic peptide
KNNQRPS

SEQ ID NO: 1006 - protein, 7 aa, synthetic construct
  REGION 1..7: note = Description of Artificial Sequence: Synthetic peptide
KNNQRPS

SEQ ID NO: 1007 - protein, 7 aa, synthetic construct
  REGION 1..7: note = Description of Artificial Sequence: Synthetic peptide
KNNQRPS

SEQ ID NO: 1008 - protein, 7 aa, synthetic construct
  REGION 1..7: note = Description of Artificial Sequence: Synthetic peptide
KNNQRPS

SEQ ID NO: 1009 - protein, 7 aa, synthetic construct
  REGION 1..7: note = Description of Artificial Sequence: Synthetic peptide
KNNQRPS

SEQ ID NO: 1010 - protein, 7 aa, synthetic construct
  REGION 1..7: note = Description of Artificial Sequence: Synthetic peptide
KNNQRPS

SEQ ID NO: 1011 - protein, 7 aa, synthetic construct
  REGION 1..7: note = Description of Artificial Sequence: Synthetic peptide
KNNQRPS

SEQ ID NO: 1012 - protein, 7 aa, synthetic construct
  REGION 1..7: note = Description of Artificial Sequence: Synthetic peptide
KNNQRPS

SEQ ID NO: 1013 - protein, 7 aa, synthetic construct
  REGION 1..7: note = Description of Artificial Sequence: Synthetic peptide
KNNQRPS

SEQ ID NO: 1014 - protein, 7 aa, synthetic construct
  REGION 1..7: note = Description of Artificial Sequence: Synthetic peptide
KNNQRPS

SEQ ID NO: 1015 - protein, 7 aa, synthetic construct
  REGION 1..7: note = Description of Artificial Sequence: Synthetic peptide
KNNQRPS

SEQ ID NO: 1016 - protein, 7 aa, synthetic construct
  REGION 1..7: note = Description of Artificial Sequence: Synthetic peptide
KNNQRPS

SEQ ID NO: 1017 - protein, 7 aa, synthetic construct
  REGION 1..7: note = Description of Artificial Sequence: Synthetic peptide
KNNQRPS

SEQ ID NO: 1018 - protein, 7 aa, synthetic construct
  REGION 1..7: note = Description of Artificial Sequence: Synthetic peptide
KNNQRPS

SEQ ID NO: 1019 - protein, 7 aa, synthetic construct
  REGION 1..7: note = Description of Artificial Sequence: Synthetic peptide
KNNQRPS

SEQ ID NO: 1020 - protein, 7 aa, synthetic construct
  REGION 1..7: note = Description of Artificial Sequence: Synthetic peptide
KNNQRPS

SEQ ID NO: 1021 - protein, 7 aa, synthetic construct
  REGION 1..7: note = Description of Artificial Sequence: Synthetic peptide
KNNQRPS

SEQ ID NO: 1022 - protein, 7 aa, synthetic construct
  REGION 1..7: note = Description of Artificial Sequence: Synthetic peptide
KNNQRPS

SEQ ID NO: 1023 - protein, 7 aa, synthetic construct
  REGION 1..7: note = Description of Artificial Sequence: Synthetic peptide
KNNQRPS

SEQ ID NO: 1024 - protein, 7 aa, synthetic construct
  REGION 1..7: note = Description of Artificial Sequence: Synthetic peptide
KNNQRPS

SEQ ID NO: 1025 - protein, 7 aa, synthetic construct
  REGION 1..7: note = Description of Artificial Sequence: Synthetic peptide
KNNQRPS

SEQ ID NO: 1026 - protein, 7 aa, synthetic construct
  REGION 1..7: note = Description of Artificial Sequence: Synthetic peptide
KNNQRPS

SEQ ID NO: 1027 - protein, 7 aa, synthetic construct
  REGION 1..7: note = Description of Artificial Sequence: Synthetic peptide
KNNQRPS

SEQ ID NO: 1028 - protein, 7 aa, synthetic construct
  REGION 1..7: note = Description of Artificial Sequence: Synthetic peptide
KNNQRPS

SEQ ID NO: 1029 - protein, 7 aa, synthetic construct
  REGION 1..7: note = Description of Artificial Sequence: Synthetic peptide
KNNQRPS

SEQ ID NO: 1030 - protein, 7 aa, synthetic construct
  REGION 1..7: note = Description of Artificial Sequence: Synthetic peptide
KNNQRPS

SEQ ID NO: 1031 - protein, 7 aa, synthetic construct
  REGION 1..7: note = Description of Artificial Sequence: Synthetic peptide
KNNQRPS

SEQ ID NO: 1032 - protein, 7 aa, synthetic construct
  REGION 1..7: note = Description of Artificial Sequence: Synthetic peptide
KNNYRPS

SEQ ID NO: 1033 - protein, 7 aa, synthetic construct
  REGION 1..7: note = Description of Artificial Sequence: Synthetic peptide
KNNQRPS

SEQ ID NO: 1034 - protein, 7 aa, synthetic construct
  REGION 1..7: note = Description of Artificial Sequence: Synthetic peptide
KNNQRPS

SEQ ID NO: 1035 - protein, 7 aa, synthetic construct
  REGION 1..7: note = Description of Artificial Sequence: Synthetic peptide
KNNQRPS

SEQ ID NO: 1036 - protein, 7 aa, synthetic construct
  REGION 1..7: note = Description of Artificial Sequence: Synthetic peptide
KNNQRPS

SEQ ID NO: 1037 - protein, 7 aa, synthetic construct
  REGION 1..7: note = Description of Artificial Sequence: Synthetic peptide
KNNQRPS

SEQ ID NO: 1038 - protein, 7 aa, synthetic construct
  REGION 1..7: note = Description of Artificial Sequence: Synthetic peptide
KNNQRPS

SEQ ID NO: 1039 - protein, 7 aa, synthetic construct
  REGION 1..7: note = Description of Artificial Sequence: Synthetic peptide
KNNQRPS

SEQ ID NO: 1040 - protein, 7 aa, synthetic construct
  REGION 1..7: note = Description of Artificial Sequence: Synthetic peptide
KNNQRPS

SEQ ID NO: 1041 - protein, 7 aa, synthetic construct
  REGION 1..7: note = Description of Artificial Sequence: Synthetic peptide
KNNQRPS

SEQ ID NO: 1042 - protein, 7 aa, synthetic construct
  REGION 1..7: note = Description of Artificial Sequence: Synthetic peptide
KNNQRPS

SEQ ID NO: 1043 - protein, 7 aa, synthetic construct
  REGION 1..7: note = Description of Artificial Sequence: Synthetic peptide
KNNQRPS

SEQ ID NO: 1044 - protein, 7 aa, synthetic construct
  REGION 1..7: note = Description of Artificial Sequence: Synthetic peptide
KNNQRPS

SEQ ID NO: 1045 - protein, 7 aa, synthetic construct
  REGION 1..7: note = Description of Artificial Sequence: Synthetic peptide
KNNQRPS

SEQ ID NO: 1046 - protein, 7 aa, synthetic construct
  REGION 1..7: note = Description of Artificial Sequence: Synthetic peptide
KNNQRPS

SEQ ID NO: 1047 - protein, 7 aa, synthetic construct
  REGION 1..7: note = Description of Artificial Sequence: Synthetic peptide
KNNQRPS

SEQ ID NO: 1048 - protein, 7 aa, synthetic construct
  REGION 1..7: note = Description of Artificial Sequence: Synthetic peptide
KNNQRPS

SEQ ID NO: 1049 - protein, 7 aa, synthetic construct
  REGION 1..7: note = Description of Artificial Sequence: Synthetic peptide
KNNQRPS

SEQ ID NO: 1050 - protein, 7 aa, synthetic construct
  REGION 1..7: note = Description of Artificial Sequence: Synthetic peptide
KNNQRPS

SEQ ID NO: 1051 - protein, 7 aa, synthetic construct
  REGION 1..7: note = Description of Artificial Sequence: Synthetic peptide
RNNQRPS

SEQ ID NO: 1052 - protein, 7 aa, synthetic construct
  REGION 1..7: note = Description of Artificial Sequence: Synthetic peptide
NNNQRPS

SEQ ID NO: 1053 - protein, 7 aa, synthetic construct
  REGION 1..7: note = Description of Artificial Sequence: Synthetic peptide
MNNQRPS

SEQ ID NO: 1054 - protein, 7 aa, synthetic construct
  REGION 1..7: note = Description of Artificial Sequence: Synthetic peptide
ANNQRPS

SEQ ID NO: 1055 - protein, 7 aa, synthetic construct
  REGION 1..7: note = Description of Artificial Sequence: Synthetic peptide
HNNQRPS

SEQ ID NO: 1056 - protein, 7 aa, synthetic construct
  REGION 1..7: note = Description of Artificial Sequence: Synthetic peptide
KDNQRPS

SEQ ID NO: 1057 - protein, 7 aa, synthetic construct
  REGION 1..7: note = Description of Artificial Sequence: Synthetic peptide
KNTQRPS

SEQ ID NO: 1058 - protein, 7 aa, synthetic construct
  REGION 1..7: note = Description of Artificial Sequence: Synthetic peptide
KNNYRPS

SEQ ID NO: 1059 - protein, 7 aa, synthetic construct
  REGION 1..7: note = Description of Artificial Sequence: Synthetic peptide
KNNARPS

SEQ ID NO: 1060 - protein, 7 aa, synthetic construct
  REGION 1..7: note = Description of Artificial Sequence: Synthetic peptide
KNNLRPS

SEQ ID NO: 1061 - protein, 7 aa, synthetic construct
  REGION 1..7: note = Description of Artificial Sequence: Synthetic peptide
KNNQQPS

SEQ ID NO: 1062 - protein, 7 aa, synthetic construct
  REGION 1..7: note = Description of Artificial Sequence: Synthetic peptide
KNNQRAS

SEQ ID NO: 1063 - protein, 7 aa, synthetic construct
  REGION 1..7: note = Description of Artificial Sequence: Synthetic peptide
KNNQRPY

SEQ ID NO: 1064 - protein, 7 aa, synthetic construct
  REGION 1..7: note = Description of Artificial Sequence: Synthetic peptide
KNNQRPL

SEQ ID NO: 1065 - protein, 7 aa, synthetic construct
  REGION 1..7: note = Description of Artificial Sequence: Synthetic peptide
KNNQRPS

SEQ ID NO: 1066 - protein, 7 aa, synthetic construct
  REGION 1..7: note = Description of Artificial Sequence: Synthetic peptide
KNNQRPS

SEQ ID NO: 1067 - protein, 7 aa, synthetic construct
  REGION 1..7: note = Description of Artificial Sequence: Synthetic peptide
KNNQRPS

SEQ ID NO: 1068 - protein, 7 aa, synthetic construct
  REGION 1..7: note = Description of Artificial Sequence: Synthetic peptide
KNNQRPS

SEQ ID NO: 1069 - protein, 7 aa, synthetic construct
  REGION 1..7: note = Description of Artificial Sequence: Synthetic peptide
KNNQRPS

SEQ ID NO: 1070 - protein, 7 aa, synthetic construct
  REGION 1..7: note = Description of Artificial Sequence: Synthetic peptide
KNNQRPS

SEQ ID NO: 1071 - protein, 7 aa, synthetic construct
  REGION 1..7: note = Description of Artificial Sequence: Synthetic peptide
KNNQRPS

SEQ ID NO: 1072 - protein, 7 aa, synthetic construct
  REGION 1..7: note = Description of Artificial Sequence: Synthetic peptide
KNNQRPS

SEQ ID NO: 1073 - protein, 7 aa, synthetic construct
  REGION 1..7: note = Description of Artificial Sequence: Synthetic peptide
KNNQRPS

SEQ ID NO: 1074 - protein, 7 aa, synthetic construct
  REGION 1..7: note = Description of Artificial Sequence: Synthetic peptide
KNNQRPS

SEQ ID NO: 1075 - protein, 7 aa, synthetic construct
  REGION 1..7: note = Description of Artificial Sequence: Synthetic peptide
KNNQRPS

SEQ ID NO: 1076 - protein, 7 aa, synthetic construct
  REGION 1..7: note = Description of Artificial Sequence: Synthetic peptide
KNNQRPS

SEQ ID NO: 1077 - protein, 7 aa, synthetic construct
  REGION 1..7: note = Description of Artificial Sequence: Synthetic peptide
KNNQRPS

SEQ ID NO: 1078 - protein, 7 aa, synthetic construct
  REGION 1..7: note = Description of Artificial Sequence: Synthetic peptide
KNNQRPS

SEQ ID NO: 1079 - protein, 7 aa, synthetic construct
  REGION 1..7: note = Description of Artificial Sequence: Synthetic peptide
KNNQRPS

SEQ ID NO: 1080 - protein, 7 aa, synthetic construct
  REGION 1..7: note = Description of Artificial Sequence: Synthetic peptide
KNNQRPS

SEQ ID NO: 1081 - protein, 7 aa, synthetic construct
  REGION 1..7: note = Description of Artificial Sequence: Synthetic peptide
KNNQRPS

SEQ ID NO: 1082 - protein, 7 aa, synthetic construct
  REGION 1..7: note = Description of Artificial Sequence: Synthetic peptide
KNNQRPS

SEQ ID NO: 1083 - protein, 7 aa, synthetic construct
  REGION 1..7: note = Description of Artificial Sequence: Synthetic peptide
KNNQRPS

SEQ ID NO: 1084 - protein, 7 aa, synthetic construct
  REGION 1..7: note = Description of Artificial Sequence: Synthetic peptide
KNNQRPS

SEQ ID NO: 1085 - protein, 7 aa, synthetic construct
  REGION 1..7: note = Description of Artificial Sequence: Synthetic peptide
KNNQRPS

SEQ ID NO: 1086 - protein, 7 aa, synthetic construct
  REGION 1..7: note = Description of Artificial Sequence: Synthetic peptide
KNNQRPS

SEQ ID NO: 1087 - protein, 7 aa, synthetic construct
  REGION 1..7: note = Description of Artificial Sequence: Synthetic peptide
KNNQRPS

SEQ ID NO: 1088 - protein, 7 aa, synthetic construct
  REGION 1..7: note = Description of Artificial Sequence: Synthetic peptide
KNNQRPS

SEQ ID NO: 1089 - protein, 7 aa, synthetic construct
  REGION 1..7: note = Description of Artificial Sequence: Synthetic peptide
KNNQRPS

SEQ ID NO: 1090 - protein, 7 aa, synthetic construct
  REGION 1..7: note = Description of Artificial Sequence: Synthetic peptide
KNNQRPS

SEQ ID NO: 1091 - protein, 7 aa, synthetic construct
  REGION 1..7: note = Description of Artificial Sequence: Synthetic peptide
KNNQRPS

SEQ ID NO: 1092 - protein, 7 aa, synthetic construct
  REGION 1..7: note = Description of Artificial Sequence: Synthetic peptide
KNNQRPS

SEQ ID NO: 1093 - protein, 7 aa, synthetic construct
  REGION 1..7: note = Description of Artificial Sequence: Synthetic peptide
KNNQRPS

SEQ ID NO: 1094 - protein, 7 aa, synthetic construct
  REGION 1..7: note = Description of Artificial Sequence: Synthetic peptide
KNNQRPS

SEQ ID NO: 1095 - protein, 7 aa, synthetic construct
  REGION 1..7: note = Description of Artificial Sequence: Synthetic peptide
KNNQRPS

SEQ ID NO: 1096 - protein, 7 aa, synthetic construct
  REGION 1..7: note = Description of Artificial Sequence: Synthetic peptide
KNNQRPS

SEQ ID NO: 1097 - protein, 7 aa, synthetic construct
  REGION 1..7: note = Description of Artificial Sequence: Synthetic peptide
KNNQRPS

SEQ ID NO: 1098 - protein, 7 aa, synthetic construct
  REGION 1..7: note = Description of Artificial Sequence: Synthetic peptide
KNNQRPS

SEQ ID NO: 1099 - protein, 7 aa, synthetic construct
  REGION 1..7: note = Description of Artificial Sequence: Synthetic peptide
KNNQRPS

SEQ ID NO: 1100 - protein, 7 aa, synthetic construct
  REGION 1..7: note = Description of Artificial Sequence: Synthetic peptide
KNNQRPS

SEQ ID NO: 1101 - protein, 7 aa, synthetic construct
  REGION 1..7: note = Description of Artificial Sequence: Synthetic peptide
KNNQRPS

SEQ ID NO: 1102 - protein, 7 aa, synthetic construct
  REGION 1..7: note = Description of Artificial Sequence: Synthetic peptide
KNNQRPS

SEQ ID NO: 1103 - protein, 7 aa, synthetic construct
  REGION 1..7: note = Description of Artificial Sequence: Synthetic peptide
KNNQRPS

SEQ ID NO: 1104 - protein, 7 aa, synthetic construct
  REGION 1..7: note = Description of Artificial Sequence: Synthetic peptide
KNNQRPS

SEQ ID NO: 1105 - protein, 7 aa, synthetic construct
  REGION 1..7: note = Description of Artificial Sequence: Synthetic peptide
KNNQRPS

SEQ ID NO: 1106 - protein, 7 aa, synthetic construct
  REGION 1..7: note = Description of Artificial Sequence: Synthetic peptide
KNNQRPS

SEQ ID NO: 1107 - protein, 7 aa, synthetic construct
  REGION 1..7: note = Description of Artificial Sequence: Synthetic peptide
KNNQRPS

SEQ ID NO: 1108 - protein, 7 aa, synthetic construct
  REGION 1..7: note = Description of Artificial Sequence: Synthetic peptide
KNNQRPS

SEQ ID NO: 1109 - protein, 7 aa, synthetic construct
  REGION 1..7: note = Description of Artificial Sequence: Synthetic peptide
KNNQRPS

SEQ ID NO: 1110 - protein, 7 aa, synthetic construct
  REGION 1..7: note = Description of Artificial Sequence: Synthetic peptide
KNNQRPS

SEQ ID NO: 1111 - protein, 7 aa, synthetic construct
  REGION 1..7: note = Description of Artificial Sequence: Synthetic peptide
KNNQRPS

SEQ ID NO: 1112 - protein, 7 aa, synthetic construct
  REGION 1..7: note = Description of Artificial Sequence: Synthetic peptide
KNNQRPS

SEQ ID NO: 1113 - protein, 7 aa, synthetic construct
  REGION 1..7: note = Description of Artificial Sequence: Synthetic peptide
KNNQRPS

SEQ ID NO: 1114 - protein, 7 aa, synthetic construct
  REGION 1..7: note = Description of Artificial Sequence: Synthetic peptide
KNNQRPS

SEQ ID NO: 1115 - protein, 7 aa, synthetic construct
  REGION 1..7: note = Description of Artificial Sequence: Synthetic peptide
KNNQRPS

SEQ ID NO: 1116 - protein, 7 aa, synthetic construct
  REGION 1..7: note = Description of Artificial Sequence: Synthetic peptide
KNNQRPS

SEQ ID NO: 1117 - protein, 7 aa, synthetic construct
  REGION 1..7: note = Description of Artificial Sequence: Synthetic peptide
KNNQRPS

SEQ ID NO: 1118 - protein, 7 aa, synthetic construct
  REGION 1..7: note = Description of Artificial Sequence: Synthetic peptide
KNNQRPS

SEQ ID NO: 1119 - protein, 7 aa, synthetic construct
  REGION 1..7: note = Description of Artificial Sequence: Synthetic peptide
KNNQRPS

SEQ ID NO: 1120 - protein, 7 aa, synthetic construct
  REGION 1..7: note = Description of Artificial Sequence: Synthetic peptide
KNNQRPS

SEQ ID NO: 1121 - protein, 7 aa, synthetic construct
  REGION 1..7: note = Description of Artificial Sequence: Synthetic peptide
KNNQRPS

SEQ ID NO: 1122 - protein, 7 aa, synthetic construct
  REGION 1..7: note = Description of Artificial Sequence: Synthetic peptide
KNNYRPS

SEQ ID NO: 1123 - protein, 7 aa, synthetic construct
  REGION 1..7: note = Description of Artificial Sequence: Synthetic peptide
KNNYRAS

SEQ ID NO: 1124 - protein, 7 aa, synthetic construct
  REGION 1..7: note = Description of Artificial Sequence: Synthetic peptide
KNSLRPQ

SEQ ID NO: 1125 - protein, 7 aa, synthetic construct
  REGION 1..7: note = Description of Artificial Sequence: Synthetic peptide
KNSLRPQ

SEQ ID NO: 1126 - protein, 7 aa, synthetic construct
  REGION 1..7: note = Description of Artificial Sequence: Synthetic peptide
KNSLRPQ

SEQ ID NO: 1127 - protein, 7 aa, synthetic construct
  REGION 1..7: note = Description of Artificial Sequence: Synthetic peptide
KNSLRPQ

SEQ ID NO: 1128 - protein, 7 aa, synthetic construct
  REGION 1..7: note = Description of Artificial Sequence: Synthetic peptide
KNNQRPS

SEQ ID NO: 1129 - protein, 7 aa, synthetic construct
  REGION 1..7: note = Description of Artificial Sequence: Synthetic peptide
KNNQRPS

SEQ ID NO: 1130 - protein, 7 aa, synthetic construct
  REGION 1..7: note = Description of Artificial Sequence: Synthetic peptide
KNNQRPS

SEQ ID NO: 1131 - protein, 7 aa, synthetic construct
  REGION 1..7: note = Description of Artificial Sequence: Synthetic peptide
KNNQRPS

SEQ ID NO: 1132 - protein, 7 aa, synthetic construct
  REGION 1..7: note = Description of Artificial Sequence: Synthetic peptide
KNNQRPS

SEQ ID NO: 1133 - protein, 7 aa, synthetic construct
  REGION 1..7: note = Description of Artificial Sequence: Synthetic peptide
RNNQQPL

SEQ ID NO: 1134 - protein, 7 aa, synthetic construct
  REGION 1..7: note = Description of Artificial Sequence: Synthetic peptide
KNTQRAS

SEQ ID NO: 1135 - protein, 7 aa, synthetic construct
  REGION 1..7: note = Description of Artificial Sequence: Synthetic peptide
RNNQQPL

SEQ ID NO: 1136 - protein, 7 aa, synthetic construct
  REGION 1..7: note = Description of Artificial Sequence: Synthetic peptide
KNNARPS

SEQ ID NO: 1137 - protein, 7 aa, synthetic construct
  REGION 1..7: note = Description of Artificial Sequence: Synthetic peptide
KDNQRAS

SEQ ID NO: 1138 - protein, 7 aa, synthetic construct
  REGION 1..7: note = Description of Artificial Sequence: Synthetic peptide
KNNQRPS

SEQ ID NO: 1139 - protein, 11 aa, synthetic construct
  REGION 1..11: note = Description of Artificial Sequence: Synthetic peptide
STWDESLSVRV

SEQ ID NO: 1140 - protein, 11 aa, synthetic construct
  REGION 1..11: note = Description of Artificial Sequence: Synthetic peptide
STWDESLSVRV

SEQ ID NO: 1141 - protein, 11 aa, synthetic construct
  REGION 1..11: note = Description of Artificial Sequence: Synthetic peptide
STWDESLSVRV

SEQ ID NO: 1142 - protein, 11 aa, synthetic construct
  REGION 1..11: note = Description of Artificial Sequence: Synthetic peptide
STWDESLSVRV

SEQ ID NO: 1143 - protein, 11 aa, synthetic construct
  REGION 1..11: note = Description of Artificial Sequence: Synthetic peptide
STWDDSLSVRV

SEQ ID NO: 1144 - protein, 11 aa, synthetic construct
  REGION 1..11: note = Description of Artificial Sequence: Synthetic peptide
STWDDSLSVRV

SEQ ID NO: 1145 - protein, 11 aa, synthetic construct
  REGION 1..11: note = Description of Artificial Sequence: Synthetic peptide
STWDDSLSVRV

SEQ ID NO: 1146 - protein, 11 aa, synthetic construct
  REGION 1..11: note = Description of Artificial Sequence: Synthetic peptide
STWDDSLSVRV

SEQ ID NO: 1147 - protein, 11 aa, synthetic construct
  REGION 1..11: note = Description of Artificial Sequence: Synthetic peptide
STWDDSLSVRV

SEQ ID NO: 1148 - protein, 11 aa, synthetic construct
  REGION 1..11: note = Description of Artificial Sequence: Synthetic peptide
STWDDSLSVRV

SEQ ID NO: 1149 - protein, 11 aa, synthetic construct
  REGION 1..11: note = Description of Artificial Sequence: Synthetic peptide
STWDDSLSVRV

SEQ ID NO: 1150 - protein, 11 aa, synthetic construct
  REGION 1..11: note = Description of Artificial Sequence: Synthetic peptide
STWDDSLSVRV

SEQ ID NO: 1151 - protein, 11 aa, synthetic construct
  REGION 1..11: note = Description of Artificial Sequence: Synthetic peptide
STWDDSLSVRV

SEQ ID NO: 1152 - protein, 11 aa, synthetic construct
  REGION 1..11: note = Description of Artificial Sequence: Synthetic peptide
STWDDSLSVRV

SEQ ID NO: 1153 - protein, 11 aa, synthetic construct
  REGION 1..11: note = Description of Artificial Sequence: Synthetic peptide
STWDDSLSVRV

SEQ ID NO: 1154 - protein, 11 aa, synthetic construct
  REGION 1..11: note = Description of Artificial Sequence: Synthetic peptide
STWDDSLSVRV

SEQ ID NO: 1155 - protein, 11 aa, synthetic construct
  REGION 1..11: note = Description of Artificial Sequence: Synthetic peptide
STWDDSLSVRV

SEQ ID NO: 1156 - protein, 11 aa, synthetic construct
  REGION 1..11: note = Description of Artificial Sequence: Synthetic peptide
STWDDSLSVRV

SEQ ID NO: 1157 - protein, 11 aa, synthetic construct
  REGION 1..11: note = Description of Artificial Sequence: Synthetic peptide
STWDDSLSVRV

SEQ ID NO: 1158 - protein, 11 aa, synthetic construct
  REGION 1..11: note = Description of Artificial Sequence: Synthetic peptide
STWDDSLSVRV

SEQ ID NO: 1159 - protein, 11 aa, synthetic construct
  REGION 1..11: note = Description of Artificial Sequence: Synthetic peptide
STWDDSLSVRV

SEQ ID NO: 1160 - protein, 11 aa, synthetic construct
  REGION 1..11: note = Description of Artificial Sequence: Synthetic peptide
STWDDSLSVRV

SEQ ID NO: 1161 - protein, 11 aa, synthetic construct
  REGION 1..11: note = Description of Artificial Sequence: Synthetic peptide
STWDDSLSVRV

SEQ ID NO: 1162 - protein, 11 aa, synthetic construct
  REGION 1..11: note = Description of Artificial Sequence: Synthetic peptide
STWDDSLSVRV

SEQ ID NO: 1163 - protein, 11 aa, synthetic construct
  REGION 1..11: note = Description of Artificial Sequence: Synthetic peptide
STWDDSLSVRV

SEQ ID NO: 1164 - protein, 11 aa, synthetic construct
  REGION 1..11: note = Description of Artificial Sequence: Synthetic peptide
STWDDSLSVRV

SEQ ID NO: 1165 - protein, 11 aa, synthetic construct
  REGION 1..11: note = Description of Artificial Sequence: Synthetic peptide
STWDDSLSVRV

SEQ ID NO: 1166 - protein, 11 aa, synthetic construct
  REGION 1..11: note = Description of Artificial Sequence: Synthetic peptide
STWDDSLSVRV

SEQ ID NO: 1167 - protein, 11 aa, synthetic construct
  REGION 1..11: note = Description of Artificial Sequence: Synthetic peptide
STWDDSLSVRV

SEQ ID NO: 1168 - protein, 11 aa, synthetic construct
  REGION 1..11: note = Description of Artificial Sequence: Synthetic peptide
STWDDSLSVRV

SEQ ID NO: 1169 - protein, 11 aa, synthetic construct
  REGION 1..11: note = Description of Artificial Sequence: Synthetic peptide
STWDDSLSVRV

SEQ ID NO: 1170 - protein, 11 aa, synthetic construct
  REGION 1..11: note = Description of Artificial Sequence: Synthetic peptide
STWDDSLSVRV

SEQ ID NO: 1171 - protein, 11 aa, synthetic construct
  REGION 1..11: note = Description of Artificial Sequence: Synthetic peptide
STWDDSLSVRV

SEQ ID NO: 1172 - protein, 11 aa, synthetic construct
  REGION 1..11: note = Description of Artificial Sequence: Synthetic peptide
STWDDSLSVRV

SEQ ID NO: 1173 - protein, 11 aa, synthetic construct
  REGION 1..11: note = Description of Artificial Sequence: Synthetic peptide
STWDDSLSVRV

SEQ ID NO: 1174 - protein, 11 aa, synthetic construct
  REGION 1..11: note = Description of Artificial Sequence: Synthetic peptide
STWDDSLSVRV

SEQ ID NO: 1175 - protein, 11 aa, synthetic construct
  REGION 1..11: note = Description of Artificial Sequence: Synthetic peptide
STWDDSLSVRV

SEQ ID NO: 1176 - protein, 11 aa, synthetic construct
  REGION 1..11: note = Description of Artificial Sequence: Synthetic peptide
STWDDSLSVRV

SEQ ID NO: 1177 - protein, 11 aa, synthetic construct
  REGION 1..11: note = Description of Artificial Sequence: Synthetic peptide
STWDDSLSVRV

SEQ ID NO: 1178 - protein, 11 aa, synthetic construct
  REGION 1..11: note = Description of Artificial Sequence: Synthetic peptide
STWDDSLSVRV

SEQ ID NO: 1179 - protein, 11 aa, synthetic construct
  REGION 1..11: note = Description of Artificial Sequence: Synthetic peptide
STWDDSLSVRV

SEQ ID NO: 1180 - protein, 11 aa, synthetic construct
  REGION 1..11: note = Description of Artificial Sequence: Synthetic peptide
STWDDSLSVRV

SEQ ID NO: 1181 - protein, 11 aa, synthetic construct
  REGION 1..11: note = Description of Artificial Sequence: Synthetic peptide
STWDDSLSVRV

SEQ ID NO: 1182 - protein, 11 aa, synthetic construct
  REGION 1..11: note = Description of Artificial Sequence: Synthetic peptide
STWDDSLSVRV

SEQ ID NO: 1183 - protein, 11 aa, synthetic construct
  REGION 1..11: note = Description of Artificial Sequence: Synthetic peptide
STWDDSLSVRV

SEQ ID NO: 1184 - protein, 11 aa, synthetic construct
  REGION 1..11: note = Description of Artificial Sequence: Synthetic peptide
STWDDSLSVRV

SEQ ID NO: 1185 - protein, 11 aa, synthetic construct
  REGION 1..11: note = Description of Artificial Sequence: Synthetic peptide
STWDDSLSVRV

SEQ ID NO: 1186 - protein, 11 aa, synthetic construct
  REGION 1..11: note = Description of Artificial Sequence: Synthetic peptide
STWDDSLSVRV

SEQ ID NO: 1187 - protein, 11 aa, synthetic construct
  REGION 1..11: note = Description of Artificial Sequence: Synthetic peptide
STWDDSLSVRV

SEQ ID NO: 1188 - protein, 11 aa, synthetic construct
  REGION 1..11: note = Description of Artificial Sequence: Synthetic peptide
STWDDSLSVRV

SEQ ID NO: 1189 - protein, 11 aa, synthetic construct
  REGION 1..11: note = Description of Artificial Sequence: Synthetic peptide
STWDDSLSVRV

SEQ ID NO: 1190 - protein, 11 aa, synthetic construct
  REGION 1..11: note = Description of Artificial Sequence: Synthetic peptide
STWDDSLSVRV

SEQ ID NO: 1191 - protein, 11 aa, synthetic construct
  REGION 1..11: note = Description of Artificial Sequence: Synthetic peptide
STWDDSLSVRV

SEQ ID NO: 1192 - protein, 11 aa, synthetic construct
  REGION 1..11: note = Description of Artificial Sequence: Synthetic peptide
STWDDSLSVRV

SEQ ID NO: 1193 - protein, 11 aa, synthetic construct
  REGION 1..11: note = Description of Artificial Sequence: Synthetic peptide
STWDDSLSVRV

SEQ ID NO: 1194 - protein, 11 aa, synthetic construct
  REGION 1..11: note = Description of Artificial Sequence: Synthetic peptide
STWDDSLSVRV

SEQ ID NO: 1195 - protein, 11 aa, synthetic construct
  REGION 1..11: note = Description of Artificial Sequence: Synthetic peptide
STWDDSLSVRV

SEQ ID NO: 1196 - protein, 11 aa, synthetic construct
  REGION 1..11: note = Description of Artificial Sequence: Synthetic peptide
STWDDSLSVRV

SEQ ID NO: 1197 - protein, 11 aa, synthetic construct
  REGION 1..11: note = Description of Artificial Sequence: Synthetic peptide
STWDDSLSVRV

SEQ ID NO: 1198 - protein, 11 aa, synthetic construct
  REGION 1..11: note = Description of Artificial Sequence: Synthetic peptide
STWDDSLSVRV

SEQ ID NO: 1199 - protein, 11 aa, synthetic construct
  REGION 1..11: note = Description of Artificial Sequence: Synthetic peptide
STWDDSLSVRV

SEQ ID NO: 1200 - protein, 11 aa, synthetic construct
  REGION 1..11: note = Description of Artificial Sequence: Synthetic peptide
STWDDSLSVRV

SEQ ID NO: 1201 - protein, 11 aa, synthetic construct
  REGION 1..11: note = Description of Artificial Sequence: Synthetic peptide
STWDDSLSVRV

SEQ ID NO: 1202 - protein, 11 aa, synthetic construct
  REGION 1..11: note = Description of Artificial Sequence: Synthetic peptide
STWDDSLSVRV

SEQ ID NO: 1203 - protein, 11 aa, synthetic construct
  REGION 1..11: note = Description of Artificial Sequence: Synthetic peptide
STWDDSLSVRV

SEQ ID NO: 1204 - protein, 11 aa, synthetic construct
  REGION 1..11: note = Description of Artificial Sequence: Synthetic peptide
STWDDSLSVRV

SEQ ID NO: 1205 - protein, 11 aa, synthetic construct
  REGION 1..11: note = Description of Artificial Sequence: Synthetic peptide
STWDDSLSVRV

SEQ ID NO: 1206 - protein, 11 aa, synthetic construct
  REGION 1..11: note = Description of Artificial Sequence: Synthetic peptide
STWDDSLSVRV

SEQ ID NO: 1207 - protein, 11 aa, synthetic construct
  REGION 1..11: note = Description of Artificial Sequence: Synthetic peptide
STWDDSLSVRV

SEQ ID NO: 1208 - protein, 11 aa, synthetic construct
  REGION 1..11: note = Description of Artificial Sequence: Synthetic peptide
STWDDSLSVRV

SEQ ID NO: 1209 - protein, 11 aa, synthetic construct
  REGION 1..11: note = Description of Artificial Sequence: Synthetic peptide
STWDDSLSVRV

SEQ ID NO: 1210 - protein, 11 aa, synthetic construct
  REGION 1..11: note = Description of Artificial Sequence: Synthetic peptide
STWDDSLSVRV

SEQ ID NO: 1211 - protein, 11 aa, synthetic construct
  REGION 1..11: note = Description of Artificial Sequence: Synthetic peptide
STWDDSLSVRV

SEQ ID NO: 1212 - protein, 11 aa, synthetic construct
  REGION 1..11: note = Description of Artificial Sequence: Synthetic peptide
STWDDSLSVRV

SEQ ID NO: 1213 - protein, 11 aa, synthetic construct
  REGION 1..11: note = Description of Artificial Sequence: Synthetic peptide
STWDDSLSVRV

SEQ ID NO: 1214 - protein, 11 aa, synthetic construct
  REGION 1..11: note = Description of Artificial Sequence: Synthetic peptide
STWDDSLSVRV

SEQ ID NO: 1215 - protein, 11 aa, synthetic construct
  REGION 1..11: note = Description of Artificial Sequence: Synthetic peptide
STWDDSLSVRV

SEQ ID NO: 1216 - protein, 11 aa, synthetic construct
  REGION 1..11: note = Description of Artificial Sequence: Synthetic peptide
STWDDSLSVRV

SEQ ID NO: 1217 - protein, 11 aa, synthetic construct
  REGION 1..11: note = Description of Artificial Sequence: Synthetic peptide
STWDDSLSVRV

SEQ ID NO: 1218 - protein, 11 aa, synthetic construct
  REGION 1..11: note = Description of Artificial Sequence: Synthetic peptide
STWDDSLSVRV

SEQ ID NO: 1219 - protein, 11 aa, synthetic construct
  REGION 1..11: note = Description of Artificial Sequence: Synthetic peptide
STWDDSLSVRV

SEQ ID NO: 1220 - protein, 11 aa, synthetic construct
  REGION 1..11: note = Description of Artificial Sequence: Synthetic peptide
STWDDSLSVRV

SEQ ID NO: 1221 - protein, 11 aa, synthetic construct
  REGION 1..11: note = Description of Artificial Sequence: Synthetic peptide
STWDDSLSVRV

SEQ ID NO: 1222 - protein, 11 aa, synthetic construct
  REGION 1..11: note = Description of Artificial Sequence: Synthetic peptide
STWDDSLSVRV

SEQ ID NO: 1223 - protein, 11 aa, synthetic construct
  REGION 1..11: note = Description of Artificial Sequence: Synthetic peptide
STWDDSLSVRV

SEQ ID NO: 1224 - protein, 11 aa, synthetic construct
  REGION 1..11: note = Description of Artificial Sequence: Synthetic peptide
STWDDSLSVRV

SEQ ID NO: 1225 - protein, 11 aa, synthetic construct
  REGION 1..11: note = Description of Artificial Sequence: Synthetic peptide
STWDDSLSVRV

SEQ ID NO: 1226 - protein, 11 aa, synthetic construct
  REGION 1..11: note = Description of Artificial Sequence: Synthetic peptide
STWDDSLSVRV

SEQ ID NO: 1227 - protein, 11 aa, synthetic construct
  REGION 1..11: note = Description of Artificial Sequence: Synthetic peptide
STWDDSLSVRV

SEQ ID NO: 1228 - protein, 11 aa, synthetic construct
  REGION 1..11: note = Description of Artificial Sequence: Synthetic peptide
STWDDSLSVRV

SEQ ID NO: 1229 - protein, 11 aa, synthetic construct
  REGION 1..11: note = Description of Artificial Sequence: Synthetic peptide
STWDDSLSVRV

SEQ ID NO: 1230 - protein, 11 aa, synthetic construct
  REGION 1..11: note = Description of Artificial Sequence: Synthetic peptide
STWDDSLSVRV

SEQ ID NO: 1231 - protein, 11 aa, synthetic construct
  REGION 1..11: note = Description of Artificial Sequence: Synthetic peptide
STWDDSLSVRV

SEQ ID NO: 1232 - protein, 11 aa, synthetic construct
  REGION 1..11: note = Description of Artificial Sequence: Synthetic peptide
STWDDSLSVRV

SEQ ID NO: 1233 - protein, 11 aa, synthetic construct
  REGION 1..11: note = Description of Artificial Sequence: Synthetic peptide
STWDDSLSVRV

SEQ ID NO: 1234 - protein, 11 aa, synthetic construct
  REGION 1..11: note = Description of Artificial Sequence: Synthetic peptide
STWDDSLSVRV

SEQ ID NO: 1235 - protein, 11 aa, synthetic construct
  REGION 1..11: note = Description of Artificial Sequence: Synthetic peptide
STWDDSLSVRV

SEQ ID NO: 1236 - protein, 11 aa, synthetic construct
  REGION 1..11: note = Description of Artificial Sequence: Synthetic peptide
STWDDSLSVRV

SEQ ID NO: 1237 - protein, 11 aa, synthetic construct
  REGION 1..11: note = Description of Artificial Sequence: Synthetic peptide
STWDDSLSVRV

SEQ ID NO: 1238 - protein, 11 aa, synthetic construct
  REGION 1..11: note = Description of Artificial Sequence: Synthetic peptide
STWDDSLSVRV

SEQ ID NO: 1239 - protein, 11 aa, synthetic construct
  REGION 1..11: note = Description of Artificial Sequence: Synthetic peptide
STWDDSLSVRV

SEQ ID NO: 1240 - protein, 11 aa, synthetic construct
  REGION 1..11: note = Description of Artificial Sequence: Synthetic peptide
STWDDSLSVRV

SEQ ID NO: 1241 - protein, 11 aa, synthetic construct
  REGION 1..11: note = Description of Artificial Sequence: Synthetic peptide
STWDDSLSVRV

SEQ ID NO: 1242 - protein, 11 aa, synthetic construct
  REGION 1..11: note = Description of Artificial Sequence: Synthetic peptide
STWDDSLSVRV

SEQ ID NO: 1243 - protein, 11 aa, synthetic construct
  REGION 1..11: note = Description of Artificial Sequence: Synthetic peptide
STWDDSLSVRV

SEQ ID NO: 1244 - protein, 11 aa, synthetic construct
  REGION 1..11: note = Description of Artificial Sequence: Synthetic peptide
STWDDSLSVRV

SEQ ID NO: 1245 - protein, 11 aa, synthetic construct
  REGION 1..11: note = Description of Artificial Sequence: Synthetic peptide
STWDDSLSVRV

SEQ ID NO: 1246 - protein, 11 aa, synthetic construct
  REGION 1..11: note = Description of Artificial Sequence: Synthetic peptide
STWDDSLSVRV

SEQ ID NO: 1247 - protein, 11 aa, synthetic construct
  REGION 1..11: note = Description of Artificial Sequence: Synthetic peptide
STWDDSLSVRV

SEQ ID NO: 1248 - protein, 11 aa, synthetic construct
  REGION 1..11: note = Description of Artificial Sequence: Synthetic peptide
STWDDSLSVRV

SEQ ID NO: 1249 - protein, 11 aa, synthetic construct
  REGION 1..11: note = Description of Artificial Sequence: Synthetic peptide
STWDDSLSVRV

SEQ ID NO: 1250 - protein, 11 aa, synthetic construct
  REGION 1..11: note = Description of Artificial Sequence: Synthetic peptide
STWDDSLSVRV

SEQ ID NO: 1251 - protein, 11 aa, synthetic construct
  REGION 1..11: note = Description of Artificial Sequence: Synthetic peptide
STWDDSLSVRV

SEQ ID NO: 1252 - protein, 11 aa, synthetic construct
  REGION 1..11: note = Description of Artificial Sequence: Synthetic peptide
STWDDSLSVRV

SEQ ID NO: 1253 - protein, 11 aa, synthetic construct
  REGION 1..11: note = Description of Artificial Sequence: Synthetic peptide
STWDDSLSVRV

SEQ ID NO: 1254 - protein, 11 aa, synthetic construct
  REGION 1..11: note = Description of Artificial Sequence: Synthetic peptide
STWDDSLSVRV

SEQ ID NO: 1255 - protein, 11 aa, synthetic construct
  REGION 1..11: note = Description of Artificial Sequence: Synthetic peptide
STWDDSLSVRV

SEQ ID NO: 1256 - protein, 11 aa, synthetic construct
  REGION 1..11: note = Description of Artificial Sequence: Synthetic peptide
STWDDSLSVRV

SEQ ID NO: 1257 - protein, 11 aa, synthetic construct
  REGION 1..11: note = Description of Artificial Sequence: Synthetic peptide
STWDDSLSVRV

SEQ ID NO: 1258 - protein, 11 aa, synthetic construct
  REGION 1..11: note = Description of Artificial Sequence: Synthetic peptide
STWDDSLSVRV

SEQ ID NO: 1259 - protein, 11 aa, synthetic construct
  REGION 1..11: note = Description of Artificial Sequence: Synthetic peptide
ATWDDSLSVRV

SEQ ID NO: 1260 - protein, 11 aa, synthetic construct
  REGION 1..11: note = Description of Artificial Sequence: Synthetic peptide
SSWDDSLSVRV

SEQ ID NO: 1261 - protein, 11 aa, synthetic construct
  REGION 1..11: note = Description of Artificial Sequence: Synthetic peptide
STFDDSLSVRV

SEQ ID NO: 1262 - protein, 11 aa, synthetic construct
  REGION 1..11: note = Description of Artificial Sequence: Synthetic peptide
STWDNSLSVRV

SEQ ID NO: 1263 - protein, 11 aa, synthetic construct
  REGION 1..11: note = Description of Artificial Sequence: Synthetic peptide
STWDDQLSVRV

SEQ ID NO: 1264 - protein, 11 aa, synthetic construct
  REGION 1..11: note = Description of Artificial Sequence: Synthetic peptide
STWDDALSVRV

SEQ ID NO: 1265 - protein, 11 aa, synthetic construct
  REGION 1..11: note = Description of Artificial Sequence: Synthetic peptide
STWDDDLSVRV

SEQ ID NO: 1266 - protein, 11 aa, synthetic construct
  REGION 1..11: note = Description of Artificial Sequence: Synthetic peptide
STWDDSNSVRV

SEQ ID NO: 1267 - protein, 11 aa, synthetic construct
  REGION 1..11: note = Description of Artificial Sequence: Synthetic peptide
STWDDSSSVRV

SEQ ID NO: 1268 - protein, 11 aa, synthetic construct
  REGION 1..11: note = Description of Artificial Sequence: Synthetic peptide
STWDDSLNVRV

SEQ ID NO: 1269 - protein, 11 aa, synthetic construct
  REGION 1..11: note = Description of Artificial Sequence: Synthetic peptide
STWDDSLLVRV

SEQ ID NO: 1270 - protein, 11 aa, synthetic construct
  REGION 1..11: note = Description of Artificial Sequence: Synthetic peptide
STWDDSLTVRV

SEQ ID NO: 1271 - protein, 11 aa, synthetic construct
  REGION 1..11: note = Description of Artificial Sequence: Synthetic peptide
STWDDSLSIRV

SEQ ID NO: 1272 - protein, 11 aa, synthetic construct
  REGION 1..11: note = Description of Artificial Sequence: Synthetic peptide
STWDDSLSVKV

SEQ ID NO: 1273 - protein, 11 aa, synthetic construct
  REGION 1..11: note = Description of Artificial Sequence: Synthetic peptide
STWDDSLSVWV

SEQ ID NO: 1274 - protein, 11 aa, synthetic construct
  REGION 1..11: note = Description of Artificial Sequence: Synthetic peptide
STWDDSLSVHV

SEQ ID NO: 1275 - protein, 11 aa, synthetic construct
  REGION 1..11: note = Description of Artificial Sequence: Synthetic peptide
STWDDSLSVQV

SEQ ID NO: 1276 - protein, 11 aa, synthetic construct
  REGION 1..11: note = Description of Artificial Sequence: Synthetic peptide
STWDDSLSVRI

SEQ ID NO: 1277 - protein, 11 aa, synthetic construct
  REGION 1..11: note = Description of Artificial Sequence: Synthetic peptide
STWNDQLSVRV

SEQ ID NO: 1278 - protein, 11 aa, synthetic construct
  REGION 1..11: note = Description of Artificial Sequence: Synthetic peptide
STWDDSLSVRV

SEQ ID NO: 1279 - protein, 11 aa, synthetic construct
  REGION 1..11: note = Description of Artificial Sequence: Synthetic peptide
STWDDSLSVRV

SEQ ID NO: 1280 - protein, 11 aa, synthetic construct
  REGION 1..11: note = Description of Artificial Sequence: Synthetic peptide
STWDDSLSVRV

SEQ ID NO: 1281 - protein, 11 aa, synthetic construct
  REGION 1..11: note = Description of Artificial Sequence: Synthetic peptide
STWDDSLSVRV

SEQ ID NO: 1282 - protein, 11 aa, synthetic construct
  REGION 1..11: note = Description of Artificial Sequence: Synthetic peptide
STWDDSLSVRV

SEQ ID NO: 1283 - protein, 11 aa, synthetic construct
  REGION 1..11: note = Description of Artificial Sequence: Synthetic peptide
STWDDSLSVRV

SEQ ID NO: 1284 - protein, 11 aa, synthetic construct
  REGION 1..11: note = Description of Artificial Sequence: Synthetic peptide
STWDDSLSVRV

SEQ ID NO: 1285 - protein, 11 aa, synthetic construct
  REGION 1..11: note = Description of Artificial Sequence: Synthetic peptide
STWDDSLSVRV

SEQ ID NO: 1286 - protein, 11 aa, synthetic construct
  REGION 1..11: note = Description of Artificial Sequence: Synthetic peptide
STWDDSLSVRV

SEQ ID NO: 1287 - protein, 11 aa, synthetic construct
  REGION 1..11: note = Description of Artificial Sequence: Synthetic peptide
STWDDSLSVRV

SEQ ID NO: 1288 - protein, 11 aa, synthetic construct
  REGION 1..11: note = Description of Artificial Sequence: Synthetic peptide
STWDDSLSVRV

SEQ ID NO: 1289 - protein, 11 aa, synthetic construct
  REGION 1..11: note = Description of Artificial Sequence: Synthetic peptide
STWDDSLSVRV

SEQ ID NO: 1290 - protein, 11 aa, synthetic construct
  REGION 1..11: note = Description of Artificial Sequence: Synthetic peptide
STWDDSLSVRV

SEQ ID NO: 1291 - protein, 11 aa, synthetic construct
  REGION 1..11: note = Description of Artificial Sequence: Synthetic peptide
STWDDSLSVRV

SEQ ID NO: 1292 - protein, 11 aa, synthetic construct
  REGION 1..11: note = Description of Artificial Sequence: Synthetic peptide
STWDDSLSVRV

SEQ ID NO: 1293 - protein, 11 aa, synthetic construct
  REGION 1..11: note = Description of Artificial Sequence: Synthetic peptide
STWDDSLSVRV

SEQ ID NO: 1294 - protein, 11 aa, synthetic construct
  REGION 1..11: note = Description of Artificial Sequence: Synthetic peptide
STWDDSLSVRV

SEQ ID NO: 1295 - protein, 11 aa, synthetic construct
  REGION 1..11: note = Description of Artificial Sequence: Synthetic peptide
STWDDSLSVRV

SEQ ID NO: 1296 - protein, 11 aa, synthetic construct
  REGION 1..11: note = Description of Artificial Sequence: Synthetic peptide
STWDDSLSVRV

SEQ ID NO: 1297 - protein, 11 aa, synthetic construct
  REGION 1..11: note = Description of Artificial Sequence: Synthetic peptide
STWDDSLSVRV

SEQ ID NO: 1298 - protein, 11 aa, synthetic construct
  REGION 1..11: note = Description of Artificial Sequence: Synthetic peptide
STWDDSLSVRV

SEQ ID NO: 1299 - protein, 11 aa, synthetic construct
  REGION 1..11: note = Description of Artificial Sequence: Synthetic peptide
STWDDSLSVRV

SEQ ID NO: 1300 - protein, 11 aa, synthetic construct
  REGION 1..11: note = Description of Artificial Sequence: Synthetic peptide
STWDDSLSVRV

SEQ ID NO: 1301 - protein, 11 aa, synthetic construct
  REGION 1..11: note = Description of Artificial Sequence: Synthetic peptide
STWDDSLSVRV

SEQ ID NO: 1302 - protein, 11 aa, synthetic construct
  REGION 1..11: note = Description of Artificial Sequence: Synthetic peptide
STWDDSLSVRV

SEQ ID NO: 1303 - protein, 11 aa, synthetic construct
  REGION 1..11: note = Description of Artificial Sequence: Synthetic peptide
STWDDSLSVRV

SEQ ID NO: 1304 - protein, 11 aa, synthetic construct
  REGION 1..11: note = Description of Artificial Sequence: Synthetic peptide
STWDDSLSVRV

SEQ ID NO: 1305 - protein, 11 aa, synthetic construct
  REGION 1..11: note = Description of Artificial Sequence: Synthetic peptide
STWDDSLSVRV

SEQ ID NO: 1306 - protein, 11 aa, synthetic construct
  REGION 1..11: note = Description of Artificial Sequence: Synthetic peptide
STWDDSLSVRV

SEQ ID NO: 1307 - protein, 11 aa, synthetic construct
  REGION 1..11: note = Description of Artificial Sequence: Synthetic peptide
STWDDSLSVRV

SEQ ID NO: 1308 - protein, 11 aa, synthetic construct
  REGION 1..11: note = Description of Artificial Sequence: Synthetic peptide
STWDDSLSVRV

SEQ ID NO: 1309 - protein, 11 aa, synthetic construct
  REGION 1..11: note = Description of Artificial Sequence: Synthetic peptide
STWDDSLSVRV

SEQ ID NO: 1310 - protein, 11 aa, synthetic construct
  REGION 1..11: note = Description of Artificial Sequence: Synthetic peptide
STWDDSLSVRV

SEQ ID NO: 1311 - protein, 11 aa, synthetic construct
  REGION 1..11: note = Description of Artificial Sequence: Synthetic peptide
STWDDSLSVRV

SEQ ID NO: 1312 - protein, 11 aa, synthetic construct
  REGION 1..11: note = Description of Artificial Sequence: Synthetic peptide
STWDDSLSVRV

SEQ ID NO: 1313 - protein, 11 aa, synthetic construct
  REGION 1..11: note = Description of Artificial Sequence: Synthetic peptide
STWDDSLSVRV

SEQ ID NO: 1314 - protein, 11 aa, synthetic construct
  REGION 1..11: note = Description of Artificial Sequence: Synthetic peptide
STWDDSLSVRV

SEQ ID NO: 1315 - protein, 11 aa, synthetic construct
  REGION 1..11: note = Description of Artificial Sequence: Synthetic peptide
STWDDSLSVRV

SEQ ID NO: 1316 - protein, 11 aa, synthetic construct
  REGION 1..11: note = Description of Artificial Sequence: Synthetic peptide
STWDDSLSVRV

SEQ ID NO: 1317 - protein, 11 aa, synthetic construct
  REGION 1..11: note = Description of Artificial Sequence: Synthetic peptide
STWDDSLSVRV

SEQ ID NO: 1318 - protein, 11 aa, synthetic construct
  REGION 1..11: note = Description of Artificial Sequence: Synthetic peptide
STWDDSLSVRV

SEQ ID NO: 1319 - protein, 11 aa, synthetic construct
  REGION 1..11: note = Description of Artificial Sequence: Synthetic peptide
STWDDSLSVRV

SEQ ID NO: 1320 - protein, 11 aa, synthetic construct
  REGION 1..11: note = Description of Artificial Sequence: Synthetic peptide
STWDDSLSVRV

SEQ ID NO: 1321 - protein, 11 aa, synthetic construct
  REGION 1..11: note = Description of Artificial Sequence: Synthetic peptide
STWDDSLSVRV

SEQ ID NO: 1322 - protein, 11 aa, synthetic construct
  REGION 1..11: note = Description of Artificial Sequence: Synthetic peptide
STWDDSLSVRV

SEQ ID NO: 1323 - protein, 11 aa, synthetic construct
  REGION 1..11: note = Description of Artificial Sequence: Synthetic peptide
STWDDSLSVRV

SEQ ID NO: 1324 - protein, 11 aa, synthetic construct
  REGION 1..11: note = Description of Artificial Sequence: Synthetic peptide
STWDDSLSVRV

SEQ ID NO: 1325 - protein, 11 aa, synthetic construct
  REGION 1..11: note = Description of Artificial Sequence: Synthetic peptide
STWDDSLSVRV

SEQ ID NO: 1326 - protein, 11 aa, synthetic construct
  REGION 1..11: note = Description of Artificial Sequence: Synthetic peptide
STWDDSLSVRV

SEQ ID NO: 1327 - protein, 11 aa, synthetic construct
  REGION 1..11: note = Description of Artificial Sequence: Synthetic peptide
STWDDALSIRV

SEQ ID NO: 1328 - protein, 11 aa, synthetic construct
  REGION 1..11: note = Description of Artificial Sequence: Synthetic peptide
STWDDALNVRV

SEQ ID NO: 1329 - protein, 11 aa, synthetic construct
  REGION 1..11: note = Description of Artificial Sequence: Synthetic peptide
SSWDDSSLVRV

SEQ ID NO: 1330 - protein, 11 aa, synthetic construct
  REGION 1..11: note = Description of Artificial Sequence: Synthetic peptide
ATWDNSLSIRV

SEQ ID NO: 1331 - protein, 11 aa, synthetic construct
  REGION 1..11: note = Description of Artificial Sequence: Synthetic peptide
STWDDALSVRV

SEQ ID NO: 1332 - protein, 11 aa, synthetic construct
  REGION 1..11: note = Description of Artificial Sequence: Synthetic peptide
STWDDSLSVRV

SEQ ID NO: 1333 - protein, 140 aa, synthetic construct
  REGION 1..140: note = Description of Artificial Sequence: Synthetic polypeptide
EVQLVESGGALVKPGGSLRLSCAASGFTFSKAWMTWVRQAPGKGLEWVGRIKSVTEGETTDYAAPVKGRFTISRDDSKSVLYLQMSSLKTEDTAVYFCTSSFCCRGGSCPSHDTSFCGGQDKRYYYMDVWGKGTTVTVSS

SEQ ID NO: 1334 - protein, 140 aa, synthetic construct
  REGION 1..140: note = Description of Artificial Sequence: Synthetic polypeptide
EVQLVESGGALVKPGGSLRLSCAASGFTFSKAWMTWVRQAPGKGLEWVGRIKSVTEGETTDYAAPVKGRFTISRDDSKSTLYLQMNSLKTEDTAVYYCTSSFCCRGGSCPSHDTSFCGGQDKRYYYMDVWGKGTTVTVSS

SEQ ID NO: 1335 - protein, 140 aa, synthetic construct; identical to SEQ ID NO: 107
  REGION 1..140: note = Description of Artificial Sequence: Synthetic polypeptide

SEQ ID NO: 1336 - protein, 140 aa, synthetic construct; identical to SEQ ID NO: 94
  REGION 1..140: note = Description of Artificial Sequence: Synthetic polypeptide

SEQ ID NO: 1337 - protein, 140 aa, synthetic construct
  REGION 1..140: note = Description of Artificial Sequence: Synthetic polypeptide
EVQLVESGGALVKPGGSLRLSCAASGYTFSKAWMSWVRQAPGKGLEWVGRIKSVTDGETTDYAAPVKGRFTISRDDSKSTLYLQMNSLKTEDTAVYYCTSSFCCRGGSCPSHDTSYCGGQYKSYYYMDVWGKGTTVTVSS

SEQ ID NO: 1338 - protein, 140 aa, synthetic construct
  REGION 1..140: note = Description of Artificial Sequence: Synthetic polypeptide
EVQLVESGGALVKPGGSLRLSCAASGFDFSKAWMSWVRQAPGKGLEWVGRIKSVTDGETTDYAAPVKGRFTISRDDSKSTLYLQMNSLKTEDTAVYYCTSSFCCRGGSCPSHDTSYCGGQYKSYYYMDVWGKGTTVTVSS

SEQ ID NO: 1339 - protein, 140 aa, synthetic construct
  REGION 1..140: note = Description of Artificial Sequence: Synthetic polypeptide
EVQLVESGGALVKPGGSLRLSCAASGFVFSKAWMSWVRQAPGKGLEWVGRIKSVTDGETTDYAAPVKGRFTISRDDSKSTLYLQMNSLKTEDTAVYYCTSSFCCRGGSCPSHDTSYCGGQYKSYYYMDVWGKGTTVTVSS

SEQ ID NO: 1340 - protein, 140 aa, synthetic construct
  REGION 1..140: note = Description of Artificial Sequence: Synthetic polypeptide
EVQLVESGGALVKPGGSLRLSCAASGFTYSKAWMSWVRQAPGKGLEWVGRIKSVTDGETTDYAAPVKGRFTISRDDSKSTLYLQMNSLKTEDTAVYYCTSSFCCRGGSCPSHDTSYCGGQYKSYYYMDVWGKGTTVTVSS

SEQ ID NO: 1341 - protein, 140 aa, synthetic construct
  REGION 1..140: note = Description of Artificial Sequence: Synthetic polypeptide
EVQLVESGGALVKPGGSLRLSCAASGFTFAKAWMSWVRQAPGKGLEWVGRIKSVTDGETTDYAAPVKGRFTISRDDSKSTLYLQMNSLKTEDTAVYYCTSSFCCRGGSCPSHDTSYCGGQYKSYYYMDVWGKGTTVTVSS

SEQ ID NO: 1342 - protein, 140 aa, synthetic construct
  REGION 1..140: note = Description of Artificial Sequence: Synthetic polypeptide
EVQLVESGGALVKPGGSLRLSCAASGFTFSNAWMSWVRQAPGKGLEWVGRIKSVTDGETTDYAAPVKGRFTISRDDSKSTLYLQMNSLKTEDTAVYYCTSSFCCRGGSCPSHDTSYCGGQYKSYYYMDVWGKGTTVTVSS

SEQ ID NO: 1343 - protein, 140 aa, synthetic construct
  REGION 1..140: note = Description of Artificial Sequence: Synthetic polypeptide
EVQLVESGGALVKPGGSLRLSCAASGFTFSRAWMSWVRQAPGKGLEWVGRIKSVTDGETTDYAAPVKGRFTISRDDSKSTLYLQMNSLKTEDTAVYYCTSSFCCRGGSCPSHDTSYCGGQYKSYYYMDVWGKGTTVTVSS

SEQ ID NO: 1344 - protein, 140 aa, synthetic construct
  REGION 1..140: note = Description of Artificial Sequence: Synthetic polypeptide
EVQLVESGGALVKPGGSLRLSCAASGFTFSMAWMSWVRQAPGKGLEWVGRIKSVTDGETTDYAAPVKGRFTISRDDSKSTLYLQMNSLKTEDTAVYYCTSSFCCRGGSCPSHDTSYCGGQYKSYYYMDVWGKGTTVTVSS

SEQ ID NO: 1345 - protein, 140 aa, synthetic construct
  REGION 1..140: note = Description of Artificial Sequence: Synthetic polypeptide
EVQLVESGGALVKPGGSLRLSCAASGFTFSAAWMSWVRQAPGKGLEWVGRIKSVTDGETTDYAAPVKGRFTISRDDSKSTLYLQMNSLKTEDTAVYYCTSSFCCRGGSCPSHDTSYCGGQYKSYYYMDVWGKGTTVTVSS

SEQ ID NO: 1346 - protein, 140 aa, synthetic construct
  REGION 1..140: note = Description of Artificial Sequence: Synthetic polypeptide
EVQLVESGGALVKPGGSLRLSCAASGFTFSHAWMSWVRQAPGKGLEWVGRIKSVTDGETTDYAAPVKGRFTISRDDSKSTLYLQMNSLKTEDTAVYYCTSSFCCRGGSCPSHDTSYCGGQYKSYYYMDVWGKGTTVTVSS

SEQ ID NO: 1347 - protein, 140 aa, synthetic construct; identical to SEQ ID NO: 1346
  REGION 1..140: note = Description of Artificial Sequence: Synthetic polypeptide

SEQ ID NO: 1348 - protein, 140 aa, synthetic construct
  REGION 1..140: note = Description of Artificial Sequence: Synthetic polypeptide
EVQLVESGGALVKPGGSLRLSCAASGFTFSKAYMSWVRQAPGKGLEWVGRIKSVTDGETTDYAAPVKGRFTISRDDSKSTLYLQMNSLKTEDTAVYYCTSSFCCRGGSCPSHDTSYCGGQYKSYYYMDVWGKGTTVTVSS

SEQ ID NO: 1349 - protein, 140 aa, synthetic construct
  REGION 1..140: note = Description of Artificial Sequence: Synthetic polypeptide
EVQLVESGGALVKPGGSLRLSCAASGFTFSKAWFSWVRQAPGKGLEWVGRIKSVTDGETTDYAAPVKGRFTISRDDSKSTLYLQMNSLKTEDTAVYYCTSSFCCRGGSCPSHDTSYCGGQYKSYYYMDVWGKGTTVTVSS

SEQ ID NO: 1350 - protein, 140 aa, synthetic construct
  REGION 1..140: note = Description of Artificial Sequence: Synthetic polypeptide
EVQLVESGGALVKPGGSLRLSCAASGFTFSKAWMSWVRQAPGKGLEWVGRIQSVTDGETTDYAAPVKGRFTISRDDSKSTLYLQMNSLKTEDTAVYYCTSSFCCRGGSCPSHDTSYCGGQYKSYYYMDVWGKGTTVTVSS

SEQ ID NO: 1351 - protein, 140 aa, synthetic construct
  REGION 1..140: note = Description of Artificial Sequence: Synthetic polypeptide
EVQLVESGGALVKPGGSLRLSCAASGFTFSKAWMSWVRQAPGKGLEWVGRIKAVTDGETTDYAAPVKGRFTISRDDSKSTLYLQMNSLKTEDTAVYYCTSSFCCRGGSCPSHDTSYCGGQYKSYYYMDVWGKGTTVTVSS

SEQ ID NO: 1352 - protein, 140 aa, synthetic construct
  REGION 1..140: note = Description of Artificial Sequence: Synthetic polypeptide
EVQLVESGGALVKPGGSLRLSCAASGFTFSKAWMSWVRQAPGKGLEWVGRIKSATDGETTDYAAPVKGRFTISRDDSKSTLYLQMNSLKTEDTAVYYCTSSFCCRGGSCPSHDTSYCGGQYKSYYYMDVWGKGTTVTVSS

SEQ ID NO: 1353 - protein, 140 aa, synthetic construct
  REGION 1..140: note = Description of Artificial Sequence: Synthetic polypeptide
EVQLVESGGALVKPGGSLRLSCAASGFTFSKAWMSWVRQAPGKGLEWVGRIKSNTDGETTDYAAPVKGRFTISRDDSKSTLYLQMNSLKTEDTAVYYCTSSFCCRGGSCPSHDTSYCGGQYKSYYYMDVWGKGTTVTVSS

SEQ ID NO: 1354 - protein, 140 aa, synthetic construct
  REGION 1..140: note = Description of Artificial Sequence: Synthetic polypeptide
EVQLVESGGALVKPGGSLRLSCAASGFTFSKAWMSWVRQAPGKGLEWVGRIKSVHDGETTDYAAPVKGRFTISRDDSKSTLYLQMNSLKTEDTAVYYCTSSFCCRGGSCPSHDTSYCGGQYKSYYYMDVWGKGTTVTVSS

SEQ ID NO: 1355 - protein, 140 aa, synthetic construct
  REGION 1..140: note = Description of Artificial Sequence: Synthetic polypeptide
EVQLVESGGALVKPGGSLRLSCAASGFTFSKAWMSWVRQAPGKGLEWVGRIKSVDDGETTDYAAPVKGRFTISRDDSKSTLYLQMNSLKTEDTAVYYCTSSFCCRGGSCPSHDTSYCGGQYKSYYYMDVWGKGTTVTVSS

SEQ ID NO: 1356 - protein, 140 aa, synthetic construct
  REGION 1..140: note = Description of Artificial Sequence: Synthetic polypeptide
EVQLVESGGALVKPGGSLRLSCAASGFTFSKAWMSWVRQAPGKGLEWVGRIKSVQDGETTDYAAPVKGRFTISRDDSKSTLYLQMNSLKTEDTAVYYCTSSFCCRGGSCPSHDTSYCGGQYKSYYYMDVWGKGTTVTVSS

SEQ ID NO: 1357 - protein, 140 aa, synthetic construct
  REGION 1..140: note = Description of Artificial Sequence: Synthetic polypeptide
EVQLVESGGALVKPGGSLRLSCAASGFTFSKAWMSWVRQAPGKGLEWVGRIKSVTNGETTDYAAPVKGRFTISRDDSKSTLYLQMNSLKTEDTAVYYCTSSFCCRGGSCPSHDTSYCGGQYKSYYYMDVWGKGTTVTVSS

SEQ ID NO: 1358 - protein, 140 aa, synthetic construct
  REGION 1..140: note = Description of Artificial Sequence: Synthetic polypeptide
EVQLVESGGALVKPGGSLRLSCAASGFTFSKAWMSWVRQAPGKGLEWVGRIKSVTDAETTDYAAPVKGRFTISRDDSKSTLYLQMNSLKTEDTAVYYCTSSFCCRGGSCPSHDTSYCGGQYKSYYYMDVWGKGTTVTVSS

SEQ ID NO: 1359 - protein, 140 aa, synthetic construct
  REGION 1..140: note = Description of Artificial Sequence: Synthetic polypeptide
EVQLVESGGALVKPGGSLRLSCAASGFTFSKAWMSWVRQAPGKGLEWVGRIKSVTDGQTTDYAAPVKGRFTISRDDSKSTLYLQMNSLKTEDTAVYYCTSSFCCRGGSCPSHDTSYCGGQYKSYYYMDVWGKGTTVTVSS

SEQ ID NO: 1360 - protein, 140 aa, synthetic construct
  REGION 1..140: note = Description of Artificial Sequence: Synthetic polypeptide
EVQLVESGGALVKPGGSLRLSCAASGFTFSKAWMSWVRQAPGKGLEWVGRIKSVTDGHTTDYAAPVKGRFTISRDDSKSTLYLQMNSLKTEDTAVYYCTSSFCCRGGSCPSHDTSYCGGQYKSYYYMDVWGKGTTVTVSS

SEQ ID NO: 1361 - protein, 140 aa, synthetic construct; identical to SEQ ID NO: 118
  REGION 1..140: note = Description of Artificial Sequence: Synthetic polypeptide

SEQ ID NO: 1362 - protein, 140 aa, synthetic construct
  REGION 1..140: note = Description of Artificial Sequence: Synthetic polypeptide
EVQLVESGGALVKPGGSLRLSCAASGFTFSKAWMSWVRQAPGKGLEWVGRIKSVTDGEATDYAAPVKGRFTISRDDSKSTLYLQMNSLKTEDTAVYYCTSSFCCRGGSCPSHDTSYCGGQYKSYYYMDVWGKGTTVTVSS

SEQ ID NO: 1363 - protein, 140 aa, synthetic construct
  REGION 1..140: note = Description of Artificial Sequence: Synthetic polypeptide
EVQLVESGGALVKPGGSLRLSCAASGFTFSKAWMSWVRQAPGKGLEWVGRIKSVTDGETTDYASPVKGRFTISRDDSKSTLYLQMNSLKTEDTAVYYCTSSFCCRGGSCPSHDTSYCGGQYKSYYYMDVWGKGTTVTVSS

SEQ ID NO: 1364 - protein, 140 aa, synthetic construct
  REGION 1..140: note = Description of Artificial Sequence: Synthetic polypeptide
EVQLVESGGALVKPGGSLRLSCAASGFTFSKAWMSWVRQAPGKGLEWVGRIKSVTDGETTDYAAPVQGRFTISRDDSKSTLYLQMNSLKTEDTAVYYCTSSFCCRGGSCPSHDTSYCGGQYKSYYYMDVWGKGTTVTVSS

SEQ ID NO: 1365 - protein, 140 aa, synthetic construct
  REGION 1..140: note = Description of Artificial Sequence: Synthetic polypeptide
EVQLVESGGALVKPGGSLRLSCAASGFTFSKAWMSWVRQAPGKGLEWVGRIKSVTDGETTDYAAPVKGRFTISRDDSKSTLYLQMNSLKTEDTAVYYCISSFCCRGGSCPSHDTSYCGGQYKSYYYMDVWGKGTTVTVSS

SEQ ID NO: 1366 - protein, 140 aa, synthetic construct
  REGION 1..140: note = Description of Artificial Sequence: Synthetic polypeptide
EVQLVESGGALVKPGGSLRLSCAASGFTFSKAWMSWVRQAPGKGLEWVGRIKSVTDGETTDYAAPVKGRFTISRDDSKSTLYLQMNSLKTEDTAVYYCTTSFCCRGGSCPSHDTSYCGGQYKSYYYMDVWGKGTTVTVSS

SEQ ID NO: 1367 - protein, 140 aa, synthetic construct
  REGION 1..140: note = Description of Artificial Sequence: Synthetic polypeptide
EVQLVESGGALVKPGGSLRLSCAASGFTFSKAWMSWVRQAPGKGLEWVGRIKSVTDGETTDYAAPVKGRFTISRDDSKSTLYLQMNSLKTEDTAVYYCTSPFCCRGGSCPSHDTSYCGGQYKSYYYMDVWGKGTTVTVSS

SEQ ID NO: 1368 - protein, 140 aa, synthetic construct
  REGION 1..140: note = Description of Artificial Sequence: Synthetic polypeptide
EVQLVESGGALVKPGGSLRLSCAASGFTFSKAWMSWVRQAPGKGLEWVGRIKSVTDGETTDYAAPVKGRFTISRDDSKSTLYLQMNSLKTEDTAVYYCTSAFCCRGGSCPSHDTSYCGGQYKSYYYMDVWGKGTTVTVSS

SEQ ID NO: 1369 - protein, 140 aa, synthetic construct
  REGION 1..140: note = Description of Artificial Sequence: Synthetic polypeptide
EVQLVESGGALVKPGGSLRLSCAASGFTFSKAWMSWVRQAPGKGLEWVGRIKSVTDGETTDYAAPVKGRFTISRDDSKSTLYLQMNSLKTEDTAVYYCTSSYCCRGGSCPSHDTSYCGGQYKSYYYMDVWGKGTTVTVSS

SEQ ID NO: 1370 - protein, 140 aa, synthetic construct
  REGION 1..140: note = Description of Artificial Sequence: Synthetic polypeptide
EVQLVESGGALVKPGGSLRLSCAASGFTFSKAWMSWVRQAPGKGLEWVGRIKSVTDGETTDYAAPVKGRFTISRDDSKSTLYLQMNSLKTEDTAVYYCTSSFCCLGGSCPSHDTSYCGGQYKSYYYMDVWGKGTTVTVSS

SEQ ID NO: 1371 - protein, 140 aa, synthetic construct
  REGION 1..140: note = Description of Artificial Sequence: Synthetic polypeptide
EVQLVESGGALVKPGGSLRLSCAASGFTFSKAWMSWVRQAPGKGLEWVGRIKSVTDGETTDYAAPVKGRFTISRDDSKSTLYLQMNSLKTEDTAVYYCTSSFCCHGGSCPSHDTSYCGGQYKSYYYMDVWGKGTTVTVSS

SEQ ID NO: 1372 - protein, 140 aa, synthetic construct
  REGION 1..140: note = Description of Artificial Sequence: Synthetic polypeptide
EVQLVESGGALVKPGGSLRLSCAASGFTFSKAWMSWVRQAPGKGLEWVGRIKSVTDGETTDYAAPVKGRFTISRDDSKSTLYLQMNSLKTEDTAVYYCTSSFCCQGGSCPSHDTSYCGGQYKSYYYMDVWGKGTTVTVSS

SEQ ID NO: 1373 - protein, 140 aa, synthetic construct
  REGION 1..140: note = Description of Artificial Sequence: Synthetic polypeptide
EVQLVESGGALVKPGGSLRLSCAASGFTFSKAWMSWVRQAPGKGLEWVGRIKSVTDGETTDYAAPVKGRFTISRDDSKSTLYLQMNSLKTEDTAVYYCTSSFCCRSGSCPSHDTSYCGGQYKSYYYMDVWGKGTTVTVSS

SEQ ID NO: 1374 - protein, 140 aa, synthetic construct
  REGION 1..140: note = Description of Artificial Sequence: Synthetic polypeptide
EVQLVESGGALVKPGGSLRLSCAASGFTFSKAWMSWVRQAPGKGLEWVGRIKSVTDGETTDYAAPVKGRFTISRDDSKSTLYLQMNSLKTEDTAVYYCTSSFCCRGASCPSHDTSYCGGQYKSYYYMDVWGKGTTVTVSS

SEQ ID NO: 1375 - protein, 140 aa, synthetic construct
  REGION 1..140: note = Description of Artificial Sequence: Synthetic polypeptide
EVQLVESGGALVKPGGSLRLSCAASGFTFSKAWMSWVRQAPGKGLEWVGRIKSVTDGETTDYAAPVKGRFTISRDDSKSTLYLQMNSLKTEDTAVYYCTSSFCCRGKSCPSHDTSYCGGQYKSYYYMDVWGKGTTVTVSS

SEQ ID NO: 1376 - protein, 140 aa, synthetic construct
  REGION 1..140: note = Description of Artificial Sequence: Synthetic polypeptide
EVQLVESGGALVKPGGSLRLSCAASGFTFSKAWMSWVRQAPGKGLEWVGRIKSVTDGETTDYAAPVKGRFTISRDDSKSTLYLQMNSLKTEDTAVYYCTSSFCCRGNSCPSHDTSYCGGQYKSYYYMDVWGKGTTVTVSS

SEQ ID NO: 1377 - protein, 140 aa, synthetic construct
  REGION 1..140: note = Description of Artificial Sequence: Synthetic polypeptide
EVQLVESGGALVKPGGSLRLSCAASGFTFSKAWMSWVRQAPGKGLEWVGRIKSVTDGETTDYAAPVKGRFTISRDDSKSTLYLQMNSLKTEDTAVYYCTSSFCCRGGNCPSHDTSYCGGQYKSYYYMDVWGKGTTVTVSS

SEQ ID NO: 1378 - protein, 140 aa, synthetic construct
  REGION 1..140: note = Description of Artificial Sequence: Synthetic polypeptide
EVQLVESGGALVKPGGSLRLSCAASGFTFSKAWMSWVRQAPGKGLEWVGRIKSVTDGETTDYAAPVKGRFTISRDDSKSTLYLQMNSLKTEDTAVYYCTSSFCCRGGQCPSHDTSYCGGQYKSYYYMDVWGKGTTVTVSS

SEQ ID NO: 1379 - protein, 140 aa, synthetic construct
  REGION 1..140: note = Description of Artificial Sequence: Synthetic polypeptide
EVQLVESGGALVKPGGSLRLSCAASGFTFSKAWMSWVRQAPGKGLEWVGRIKSVTDGETTDYAAPVKGRFTISRDDSKSTLYLQMNSLKTEDTAVYYCTSSFCCRGGACPSHDTSYCGGQYKSYYYMDVWGKGTTVTVSS

SEQ ID NO: 1380 - protein, 140 aa, synthetic construct
  REGION 1..140: note = Description of Artificial Sequence: Synthetic polypeptide
EVQLVESGGALVKPGGSLRLSCAASGFTFSKAWMSWVRQAPGKGLEWVGRIKSVTDGETTDYAAPVKGRFTISRDDSKSTLYLQMNSLKTEDTAVYYCTSSFCCRGGSCASHDTSYCGGQYKSYYYMDVWGKGTTVTVSS

SEQ ID NO: 1381 - protein, 140 aa, synthetic construct
  REGION 1..140: note = Description of Artificial Sequence: Synthetic polypeptide
EVQLVESGGALVKPGGSLRLSCAASGFTFSKAWMSWVRQAPGKGLEWVGRIKSVTDGETTDYAAPVKGRFTISRDDSKSTLYLQMNSLKTEDTAVYYCTSSFCCRGGSCLSHDTSYCGGQYKSYYYMDVWGKGTTVTVSS

SEQ ID NO: 1382 - protein, 140 aa, synthetic construct
  REGION 1..140: note = Description of Artificial Sequence: Synthetic polypeptide
EVQLVESGGALVKPGGSLRLSCAASGFTFSKAWMSWVRQAPGKGLEWVGRIKSVTDGETTDYAAPVKGRFTISRDDSKSTLYLQMNSLKTEDTAVYYCTSSFCCRGGSCPAHDTSYCGGQYKSYYYMDVWGKGTTVTVSS

SEQ ID NO: 1383 - protein, 140 aa, synthetic construct
  REGION 1..140: note = Description of Artificial Sequence: Synthetic polypeptide
EVQLVESGGALVKPGGSLRLSCAASGFTFSKAWMSWVRQAPGKGLEWVGRIKSVTDGETTDYAAPVKGRFTISRDDSKSTLYLQMNSLKTEDTAVYYCTSSFCCRGGSCPNHDTSYCGGQYKSYYYMDVWGKGTTVTVSS

SEQ ID NO: 1384 - protein, 140 aa, synthetic construct
  REGION 1..140: note = Description of Artificial Sequence: Synthetic polypeptide
EVQLVESGGALVKPGGSLRLSCAASGFTFSKAWMSWVRQAPGKGLEWVGRIKSVTDGETTDYAAPVKGRFTISRDDSKSTLYLQMNSLKTEDTAVYYCTSSFCCRGGSCPSSDTSYCGGQYKSYYYMDVWGKGTTVTVSS

SEQ ID NO: 1385 - protein, 140 aa, synthetic construct
  REGION 1..140: note = Description of Artificial Sequence: Synthetic polypeptide
EVQLVESGGALVKPGGSLRLSCAASGFTFSKAWMSWVRQAPGKGLEWVGRIKSVTDGETTDYAAPVKGRFTISRDDSKSTLYLQMNSLKTEDTAVYYCTSSFCCRGGSCPSQDTSYCGGQYKSYYYMDVWGKGTTVTVSS

SEQ ID NO: 1386 - protein, 140 aa, synthetic construct
  REGION 1..140: note = Description of Artificial Sequence: Synthetic polypeptide
EVQLVESGGALVKPGGSLRLSCAASGFTFSKAWMSWVRQAPGKGLEWVGRIKSVTDGETTDYAAPVKGRFTISRDDSKSTLYLQMNSLKTEDTAVYYCTSSFCCRGGSCPSHETSYCGGQYKSYYYMDVWGKGTTVTVSS

SEQ ID NO: 1387 - protein, 140 aa, synthetic construct
  REGION 1..140: note = Description of Artificial Sequence: Synthetic polypeptide
EVQLVESGGALVKPGGSLRLSCAASGFTFSKAWMSWVRQAPGKGLEWVGRIKSVTDGETTDYAAPVKGRFTISRDDSKSTLYLQMNSLKTEDTAVYYCTSSFCCRGGSCPSHDQSYCGGQYKSYYYMDVWGKGTTVTVSS

SEQ ID NO: 1388 - protein, 140 aa, synthetic construct
  REGION 1..140: note = Description of Artificial Sequence: Synthetic polypeptide
EVQLVESGGALVKPGGSLRLSCAASGFTFSKAWMSWVRQAPGKGLEWVGRIKSVTDGETTDYAAPVKGRFTISRDDSKSTLYLQMNSLKTEDTAVYYCTSSFCCRGGSCPSHDTSMCGGQYKSYYYMDVWGKGTTVTVSS

SEQ ID NO: 1389 - protein, 140 aa, synthetic construct
  REGION 1..140: note = Description of Artificial Sequence: Synthetic polypeptide
EVQLVESGGALVKPGGSLRLSCAASGFTFSKAWMSWVRQAPGKGLEWVGRIKSVTDGETTDYAAPVKGRFTISRDDSKSTLYLQMNSLKTEDTAVYYCTSSFCCRGGSCPSHDTSYCAGQYKSYYYMDVWGKGTTVTVSS

SEQ ID NO: 1390 - protein, 140 aa, synthetic construct
  REGION 1..140: note = Description of Artificial Sequence: Synthetic polypeptide
EVQLVESGGALVKPGGSLRLSCAASGFTFSKAWMSWVRQAPGKGLEWVGRIKSVTDGETTDYAAPVKGRFTISRDDSKSTLYLQMNSLKTEDTAVYYCTSSFCCRGGSCPSHDTSYCNGQYKSYYYMDVWGKGTTVTVSS

SEQ ID NO: 1391 - protein, 140 aa, synthetic construct
  REGION 1..140: note = Description of Artificial Sequence: Synthetic polypeptide
EVQLVESGGALVKPGGSLRLSCAASGFTFSKAWMSWVRQAPGKGLEWVGRIKSVTDGETTDYAAPVKGRFTISRDDSKSTLYLQMNSLKTEDTAVYYCTSSFCCRGGSCPSHDTSYCGNQYKSYYYMDVWGKGTTVTVSS

SEQ ID NO: 1392 - protein, 140 aa, synthetic construct
  REGION 1..140: note = Description of Artificial Sequence: Synthetic polypeptide
EVQLVESGGALVKPGGSLRLSCAASGFTFSKAWMSWVRQAPGKGLEWVGRIKSVTDGETTDYAAPVKGRFTISRDDSKSTLYLQMNSLKTEDTAVYYCTSSFCCRGGSCPSHDTSYCGAQYKSYYYMDVWGKGTTVTVSS

SEQ ID NO: 1393 - protein, 140 aa, synthetic construct
  REGION 1..140: note = Description of Artificial Sequence: Synthetic polypeptide
EVQLVESGGALVKPGGSLRLSCAASGFTFSKAWMSWVRQAPGKGLEWVGRIKSVTDGETTDYAAPVKGRFTISRDDSKSTLYLQMNSLKTEDTAVYYCTSSFCCRGGSCPSHDTSYCGGSYKSYYYMDVWGKGTTVTVSS

SEQ ID NO: 1394 - protein, 140 aa, synthetic construct
  REGION 1..140: note = Description of Artificial Sequence: Synthetic polypeptide
EVQLVESGGALVKPGGSLRLSCAASGFTFSKAWMSWVRQAPGKGLEWVGRIKSVTDGETTDYAAPVKGRFTISRDDSKSTLYLQMNSLKTEDTAVYYCTSSFCCRGGSCPSHDTSYCGGYYKSYYYMDVWGKGTTVTVSS

SEQ ID NO: 1395 - protein, 140 aa, synthetic construct
  REGION 1..140: note = Description of Artificial Sequence: Synthetic polypeptide
EVQLVESGGALVKPGGSLRLSCAASGFTFSKAWMSWVRQAPGKGLEWVGRIKSVTDGETTDYAAPVKGRFTISRDDSKSTLYLQMNSLKTEDTAVYYCTSSFCCRGGSCPSHDTSYCGGQFKSYYYMDVWGKGTTVTVSS

SEQ ID NO: 1396 - protein, 140 aa, synthetic construct
  REGION 1..140: note = Description of Artificial Sequence: Synthetic polypeptide
EVQLVESGGALVKPGGSLRLSCAASGFTFSKAWMSWVRQAPGKGLEWVGRIKSVTDGETTDYAAPVKGRFTISRDDSKSTLYLQMNSLKTEDTAVYYCTSSFCCRGGSCPSHDTSYCGGQYPSYYYMDVWGKGTTVTVSS

SEQ ID NO: 1397 - protein, 140 aa, synthetic construct
  REGION 1..140: note = Description of Artificial Sequence: Synthetic polypeptide
EVQLVESGGALVKPGGSLRLSCAASGFTFSKAWMSWVRQAPGKGLEWVGRIKSVTDGETTDYAAPVKGRFTISRDDSKSTLYLQMNSLKTEDTAVYYCTSSFCCRGGSCPSHDTSYCGGQYASYYYMDVWGKGTTVTVSS

SEQ ID NO: 1398 - protein, 140 aa, synthetic construct
  REGION 1..140: note = Description of Artificial Sequence: Synthetic polypeptide
EVQLVESGGALVKPGGSLRLSCAASGFTFSKAWMSWVRQAPGKGLEWVGRIKSVTDGETTDYAAPVKGRFTISRDDSKSTLYLQMNSLKTEDTAVYYCTSSFCCRGGSCPSHDTSYCGGQYQSYYYMDVWGKGTTVTVSS

SEQ ID NO: 1399 - protein, 140 aa, synthetic construct
  REGION 1..140: note = Description of Artificial Sequence: Synthetic polypeptide
EVQLVESGGALVKPGGSLRLSCAASGFTFSKAWMSWVRQAPGKGLEWVGRIKSVTDGETTDYAAPVKGRFTISRDDSKSTLYLQMNSLKTEDTAVYYCTSSFCCRGGSCPSHDTSYCGGQYKDYYYMDVWGKGTTVTVSS

SEQ ID NO: 1400 - protein, 140 aa, synthetic construct
  REGION 1..140: note = Description of Artificial Sequence: Synthetic polypeptide
EVQLVESGGALVKPGGSLRLSCAASGFTFSKAWMSWVRQAPGKGLEWVGRIKSVTDGETTDYAAPVKGRFTISRDDSKSTLYLQMNSLKTEDTAVYYCTSSFCCRGGSCPSHDTSYCGGQYKSFYYMDVWGKGTTVTVSS

SEQ ID NO: 1401 - protein, 140 aa, synthetic construct
  REGION 1..140: note = Description of Artificial Sequence: Synthetic polypeptide
EVQLVESGGALVKPGGSLRLSCAASGFTFSKAWMSWVRQAPGKGLEWVGRIKSVTDGETTDYAAPVKGRFTISRDDSKSTLYLQMNSLKTEDTAVYYCTSSFCCRGGSCPSHDTSYCGGQYKSYFYMDVWGKGTTVTVSS

SEQ ID NO: 1402 - protein, 140 aa, synthetic construct
  REGION 1..140: note = Description of Artificial Sequence: Synthetic polypeptide
EVQLVESGGALVKPGGSLRLSCAASGFTFSKAWMSWVRQAPGKGLEWVGRIKSVTDGETTDYAAPVKGRFTISRDDSKSTLYLQMNSLKTEDTAVYYCTSSFCCRGGSCPSHDTSYCGGQYKSYYWMDVWGKGTTVTVSS

SEQ ID NO: 1403 - protein, 140 aa, synthetic construct
  REGION 1..140: note = Description of Artificial Sequence: Synthetic polypeptide
EVQLVESGGALVKPGGSLRLSCAASGFTFSKAWMSWVRQAPGKGLEWVGRIKSVTDGETTDYAAPVKGRFTISRDDSKSTLYLQMNSLKTEDTAVYYCTSSFCCRGGSCPSHDTSYCGGQYKSYYLMDVWGKGTTVTVSS

SEQ ID NO: 1404 - protein, 140 aa, synthetic construct
  REGION 1..140: note = Description of Artificial Sequence: Synthetic polypeptide
EVQLVESGGALVKPGGSLRLSCAASGFTFSKAWMSWVRQAPGKGLEWVGRIKSVTDGETTDYAAPVKGRFTISRDDSKSTLYLQMNSLKTEDTAVYYCTSSFCCRGGSCPSHDTSYCGGQYKSYYYVDVWGKGTTVTVSS

SEQ ID NO: 1405 - protein, 140 aa, synthetic construct
  REGION 1..140: note = Description of Artificial Sequence: Synthetic polypeptide
EVQLVESGGALVKPGGSLRLSCAASGFTFSKAWMSWVRQAPGKGLEWVGRIKSVTDGETTDYAAPVKGRFTISRDDSKSTLYLQMNSLKTEDTAVYYCTSSFCCRGGSCPSHDTSYCGGQYKSYYYFDVWGKGTTVTVSS

SEQ ID NO: 1406 - protein, 140 aa, synthetic construct
  REGION 1..140: note = Description of Artificial Sequence: Synthetic polypeptide
EVQLVESGGALVKPGGSLRLSCAASGFTFSKAWMSWVRQAPGKGLEWVGRIKSVTDGETTDYAAPVKGRFTISRDDSKSTLYLQMNSLKTEDTAVYYCTSSFCCRGGSCPSHDTSYCGGQYKSYYYMNVWGKGTTVTVSS

SEQ ID NO: 1407 - protein, 140 aa, synthetic construct
  REGION 1..140: note = Description of Artificial Sequence: Synthetic polypeptide
EVQLVESGGALVKPGGSLRLSCAASGFTFSKAWMSWVRQAPGKGLEWVGRIKSVTDGETTDYAAPVKGRFTISRDDSKSTLYLQMNSLKTEDTAVYYCTSSFCCRGGSCPSHDTSYCGGQYKSYYYMDIWGKGTTVTVSS

SEQ ID NO: 1408 - protein, 140 aa, synthetic construct
  REGION 1..140: note = Description of Artificial Sequence: Synthetic polypeptide
EVQLVESGGALVKPGGSLRLSCAASGFTFSKAWMSWVRQAPGKGLEWVGRIKSVTDGETTDYAAPVKGRFTISRDDSKSTLYLQMNSLKTEDTAVYYCTSSFCCRGGSCPSHDTSYCGGQYKSYYYMDPWGKGTTVTVSS

SEQ ID NO: 1409 - protein, 140 aa, synthetic construct
  REGION 1..140: note = Description of Artificial Sequence: Synthetic polypeptide
EVQLVESGGALVKPGGSLRLSCAASGFTFSKAWMSWVRQAPGKGLEWVGRIKSVTDGETTDYAAPVKGRFTISRDDSKSTLYLQMNSLKTEDTAVYYCTSSFCCRGGSCPSHDTSYCGGQFKDYYYMDVWGKGTTVTVSS

SEQ ID NO: 1410 - protein, 140 aa, synthetic construct
  REGION 1..140: note = Description of Artificial Sequence: Synthetic polypeptide
EVQLVESGGALVKPGGSLRLSCAASGFTFSKAWMSWVRQAPGKGLEWVGRIKSVTDGETTDYAAPVKGRFTISRDDSKSTLYLQMNSLKTEDTAVYYCTSSFCCRGGSCPSHDTSYCGGQSKQYYYMDVWGKGTTVTVSS

SEQ ID NO: 1411 - protein, 140 aa, synthetic construct
  REGION 1..140: note = Description of Artificial Sequence: Synthetic polypeptide
EVQLVESGGALVKPGGSLRLSCAASGFTFSKAWMSWVRQAPGKGLEWVGRIKSVTDGETTDYAAPVKGRFTISRDDSKSTLYLQMNSLKTEDTAVYYCTSSFCCRGGSCPSHDTSYCGGQSKKYYYMDVWGKGTTVTVSS

SEQ ID NO: 1412 - protein, 140 aa, synthetic construct
  REGION 1..140: note = Description of Artificial Sequence: Synthetic polypeptide
EVQLVESGGALVKPGGSLRLSCAASGFTFSKAWMSWVRQAPGKGLEWVGRIKSVTDGETTDYAAPVKGRFTISRDDSKSTLYLQMNSLKTEDTAVYYCTSSFSCRGGSCPSHDTSYSGGQYKSYYYMDVWGKGTTVTVSS

SEQ ID NO: 1413 - protein, 140 aa, synthetic construct
  REGION 1..140: note = Description of Artificial Sequence: Synthetic polypeptide
EVQLVESGGALVKPGGSLRLSCAASGFTFSKAWMSWVRQAPGKGLEWVGRIKSVTDGETTDYAAPVKGRFTISRDDSKSTLYLQMNSLKTEDTAVYYCTSSFACRGGSCPSHDTSYVGGQYKSYYYMDVWGKGTTVTVSS

SEQ ID NO: 1414 - protein, 140 aa, synthetic construct
  REGION 1..140: note = Description of Artificial Sequence: Synthetic polypeptide
EVQLVESGGALVKPGGSLRLSCAASGFTFSKAWMSWVRQAPGKGLEWVGRIKSVTDGETTDYAAPVKGRFTISRDDSKSTLYLQMNSLKTEDTAVYYCTSSFCCRGNSCPAHDTSYCGGQYPSYYYMDVWGKGTTVTVSS

SEQ ID NO: 1415 - protein, 140 aa, synthetic construct
  REGION 1..140: note = Description of Artificial Sequence: Synthetic polypeptide
EVQLVESGGALVKPGGSLRLSCAASGFTFSKAWMSWVRQAPGKGLEWVGRIKSVTDGETTDYAAPVKGRFTISRDDSKSTLYLQMNSLKTEDTAVYYCTSSYCCLGGSCPSHDTSYCGGSYKSYYYMDVWGKGTTVTVSS

SEQ ID NO: 1416 - protein, 140 aa, synthetic construct
  REGION 1..140: note = Description of Artificial Sequence: Synthetic polypeptide
EVQLVESGGALVKPGGSLRLSCAASGFTFSKAWMSWVRQAPGKGLEWVGRIKSVTDGETTDYAAPVKGRFTISRDDSKSTLYLQMNSLKTEDTAVYYCTSSFCCRGKSCPSHDNSYCGGQYASYYYMDVWGKGTTVTVSS

SEQ ID NO: 1417 - protein, 140 aa, synthetic construct
  REGION 1..140: note = Description of Artificial Sequence: Synthetic polypeptide
EVQLVESGGALVKPGGSLRLSCAASGFTFSKAWMSWVRQAPGKGLEWVGRIKSVTDGETTDYAAPVKGRFTISRDDSKSTLYLQMNSLKTEDTAVYYCTSSYCCRGGSCPSHDTSYCGGQFKSYYYMDPWGKGTTVTVSS

SEQ ID NO: 1418 - protein, 140 aa, synthetic construct
  REGION 1..140: note = Description of Artificial Sequence: Synthetic polypeptide
EVQLVESGGALVKPGGSLRLSCAASGFTFSKAWMSWVRQAPGKGLEWVGRIKSVTDGETTDYAAPVKGRFTISRDDSKSTLYLQMNSLKTEDTAVYYCTSTFCCRGGSCLSHDTSYCGGQYKSYYWMDVWGKGTTVTVSS

SEQ ID NO: 1419 - protein, 140 aa, synthetic construct
  REGION 1..140: note = Description of Artificial Sequence: Synthetic polypeptide
EVQLVESGGALVKPGGSLRLSCAASGFDFSKAWMSWVRQAPGKGLEWVGRIKSVTDGQTTDYAAPVKGRFTISRDDSKSTLYLQMNSLKTEDTAVYYCTSSFCCRGGSCPSHDTSYCGGQYKSYYYMDVWGKGTTVTVSS

SEQ ID NO: 1420 - protein, 140 aa, synthetic construct; identical to SEQ ID NO: 1341
  REGION 1..140: note = Description of Artificial Sequence: Synthetic polypeptide

SEQ ID NO: 1421 - protein, 140 aa, synthetic construct
  REGION 1..140: note = Description of Artificial Sequence: Synthetic polypeptide
EVQLVESGGALVKPGGSLRLSCAASGFDASKAWFTWVRQAPGKGLEWVGRIKSVTDGETTDYAAPVKGRFTISRDDSKSTLYLQMNSLKTEDTAVYYCTSSFCCRGGSCPSHDTSYCGGQYKSYYYMDVWGKGTTVTVSS

SEQ ID NO: 1422 - protein, 140 aa, synthetic construct; identical to SEQ ID NO: 94
  REGION 1..140: note = Description of Artificial Sequence: Synthetic polypeptide

SEQ ID NO: 1423 - protein, 140 aa, synthetic construct; identical to SEQ ID NO: 94
  REGION 1..140: note = Description of Artificial Sequence: Synthetic polypeptide

SEQ ID NO: 1424 - protein, 140 aa, synthetic construct; identical to SEQ ID NO: 94
  REGION 1..140: note = Description of Artificial Sequence: Synthetic polypeptide

SEQ ID NO: 1425 - protein, 140 aa, synthetic construct; identical to SEQ ID NO: 94
  REGION 1..140: note = Description of Artificial Sequence: Synthetic polypeptide

SEQ ID NO: 1426 - protein, 140 aa, synthetic construct; identical to SEQ ID NO: 94
  REGION 1..140: note = Description of Artificial Sequence: Synthetic polypeptide

SEQ ID NO: 1427 - protein, 140 aa, synthetic construct; identical to SEQ ID NO: 94
  REGION 1..140: note = Description of Artificial Sequence: Synthetic polypeptide

SEQ ID NO: 1428 - protein, 140 aa, synthetic construct; identical to SEQ ID NO: 94
  REGION 1..140: note = Description of Artificial Sequence: Synthetic polypeptide

SEQ ID NO: 1429 - protein, 140 aa, synthetic construct; identical to SEQ ID NO: 94
  REGION 1..140: note = Description of Artificial Sequence: Synthetic polypeptide

SEQ ID NO: 1430 - protein, 140 aa, synthetic construct; identical to SEQ ID NO: 94
  REGION 1..140: note = Description of Artificial Sequence: Synthetic polypeptide

SEQ ID NO: 1431 - protein, 140 aa, synthetic construct; identical to SEQ ID NO: 94
  REGION 1..140: note = Description of Artificial Sequence: Synthetic polypeptide

SEQ ID NO: 1432 - protein, 140 aa, synthetic construct; identical to SEQ ID NO: 94
  REGION 1..140: note = Description of Artificial Sequence: Synthetic polypeptide

SEQ ID NO: 1433 - protein, 140 aa, synthetic construct; identical to SEQ ID NO: 94
  REGION 1..140: note = Description of Artificial Sequence: Synthetic polypeptide

SEQ ID NO: 1434 - protein, 140 aa, synthetic construct; identical to SEQ ID NO: 94
  REGION 1..140: note = Description of Artificial Sequence: Synthetic polypeptide

SEQ ID NO: 1435 - protein, 140 aa, synthetic construct; identical to SEQ ID NO: 94
  REGION 1..140: note = Description of Artificial Sequence: Synthetic polypeptide

SEQ ID NO: 1436 - protein, 140 aa, synthetic construct; identical to SEQ ID NO: 94
  REGION 1..140: note = Description of Artificial Sequence: Synthetic polypeptide

SEQ ID NO: 1437 - protein, 140 aa, synthetic construct; identical to SEQ ID NO: 94
  REGION 1..140: note = Description of Artificial Sequence: Synthetic polypeptide

SEQ ID NO: 1438 - protein, 140 aa, synthetic construct; identical to SEQ ID NO: 94
  REGION 1..140: note = Description of Artificial Sequence: Synthetic polypeptide

SEQ ID NO: 1439 - protein, 140 aa, synthetic construct; identical to SEQ ID NO: 94
  REGION 1..140: note = Description of Artificial Sequence: Synthetic polypeptide

SEQ ID NO: 1440 - protein, 140 aa, synthetic construct; identical to SEQ ID NO: 94
  REGION 1..140: note = Description of Artificial Sequence: Synthetic polypeptide

SEQ ID NO: 1441 - protein, 140 aa, synthetic construct; identical to SEQ ID NO: 94
  REGION 1..140: note = Description of Artificial Sequence: Synthetic polypeptide

SEQ ID NO: 1442 - protein, 140 aa, synthetic construct; identical to SEQ ID NO: 94
  REGION 1..140: note = Description of Artificial Sequence: Synthetic polypeptide

SEQ ID NO: 1443 - protein, 140 aa, synthetic construct; identical to SEQ ID NO: 94
  REGION 1..140: note = Description of Artificial Sequence: Synthetic polypeptide

SEQ ID NO: 1444 - protein, 140 aa, synthetic construct; identical to SEQ ID NO: 94
  REGION 1..140: note = Description of Artificial Sequence: Synthetic polypeptide

SEQ ID NO: 1445 - protein, 140 aa, synthetic construct; identical to SEQ ID NO: 94
  REGION 1..140: note = Description of Artificial Sequence: Synthetic polypeptide

SEQ ID NO: 1446 - protein, 140 aa, synthetic construct; identical to SEQ ID NO: 94
  REGION 1..140: note = Description of Artificial Sequence: Synthetic polypeptide

SEQ ID NO: 1447 - protein, 140 aa, synthetic construct; identical to SEQ ID NO: 94
  REGION 1..140: note = Description of Artificial Sequence: Synthetic polypeptide

SEQ ID NO: 1448 - protein, 140 aa, synthetic construct; identical to SEQ ID NO: 94
  REGION 1..140: note = Description of Artificial Sequence: Synthetic polypeptide

SEQ ID NO: 1449 - protein, 140 aa, synthetic construct; identical to SEQ ID NO: 94
  REGION 1..140: note = Description of Artificial Sequence: Synthetic polypeptide

SEQ ID NO: 1450 - protein, 140 aa, synthetic construct; identical to SEQ ID NO: 94
  REGION 1..140: note = Description of Artificial Sequence: Synthetic polypeptide

SEQ ID NO: 1451 - protein, 140 aa, synthetic construct; identical to SEQ ID NO: 94
  REGION 1..140: note = Description of Artificial Sequence: Synthetic polypeptide

SEQ ID NO: 1452 - protein, 140 aa, synthetic construct; identical to SEQ ID NO: 94
  REGION 1..140: note = Description of Artificial Sequence: Synthetic polypeptide

SEQ ID NO: 1453 - protein, 140 aa, synthetic construct; identical to SEQ ID NO: 94
  REGION 1..140: note = Description of Artificial Sequence: Synthetic polypeptide

SEQ ID NO: 1454 - protein, 140 aa, synthetic construct; identical to SEQ ID NO: 94
  REGION 1..140: note = Description of Artificial Sequence: Synthetic polypeptide

SEQ ID NO: 1455 - protein, 140 aa, synthetic construct; identical to SEQ ID NO: 94
  REGION 1..140: note = Description of Artificial Sequence: Synthetic polypeptide

SEQ ID NO: 1456 - protein, 140 aa, synthetic construct; identical to SEQ ID NO: 94
  REGION 1..140: note = Description of Artificial Sequence: Synthetic polypeptide

SEQ ID NO: 1457 - protein, 140 aa, synthetic construct; identical to SEQ ID NO: 94
  REGION 1..140: note = Description of Artificial Sequence: Synthetic polypeptide

SEQ ID NO: 1458 - protein, 140 aa, synthetic construct; identical to SEQ ID NO: 94
  REGION 1..140: note = Description of Artificial Sequence: Synthetic polypeptide

SEQ ID NO: 1459 - protein, 140 aa, synthetic construct; identical to SEQ ID NO: 94
  REGION 1..140: note = Description of Artificial Sequence: Synthetic polypeptide

SEQ ID NO: 1460 - protein, 140 aa, synthetic construct; identical to SEQ ID NO: 94
  REGION 1..140: note = Description of Artificial Sequence: Synthetic polypeptide

SEQ ID NO: 1461 - protein, 140 aa, synthetic construct; identical to SEQ ID NO: 94
  REGION 1..140: note = Description of Artificial Sequence: Synthetic polypeptide

SEQ ID NO: 1462 - protein, 140 aa, synthetic construct; identical to SEQ ID NO: 94
  REGION 1..140: note = Description of Artificial Sequence: Synthetic polypeptide

SEQ ID NO: 1463 - protein, 140 aa, synthetic construct; identical to SEQ ID NO: 94
  REGION 1..140: note = Description of Artificial Sequence: Synthetic polypeptide

SEQ ID NO: 1464 - protein, 140 aa, synthetic construct; identical to SEQ ID NO: 94
  REGION 1..140: note = Description of Artificial Sequence: Synthetic polypeptide

SEQ ID NO: 1465 - protein, 140 aa, synthetic construct; identical to SEQ ID NO: 94
  REGION 1..140: note = Description of Artificial Sequence: Synthetic polypeptide

SEQ ID NO: 1466 - protein, 140 aa, synthetic construct; identical to SEQ ID NO: 94
  REGION 1..140: note = Description of Artificial Sequence: Synthetic polypeptide

SEQ ID NO: 1467 - protein, 140 aa, synthetic construct; identical to SEQ ID NO: 94
  REGION 1..140: note = Description of Artificial Sequence: Synthetic polypeptide

SEQ ID NO: 1468 - protein, 140 aa, synthetic construct; identical to SEQ ID NO: 94
  REGION 1..140: note = Description of Artificial Sequence: Synthetic polypeptide

SEQ ID NO: 1469 - protein, 140 aa, synthetic construct; identical to SEQ ID NO: 94
  REGION 1..140: note = Description of Artificial Sequence: Synthetic polypeptide

SEQ ID NO: 1470 - protein, 140 aa, synthetic construct; identical to SEQ ID NO: 94
  REGION 1..140: note = Description of Artificial Sequence: Synthetic polypeptide

SEQ ID NO: 1471 - protein, 140 aa, synthetic construct; identical to SEQ ID NO: 94
  REGION 1..140: note = Description of Artificial Sequence: Synthetic polypeptide

SEQ ID NO: 1472 - protein, 140 aa, synthetic construct; identical to SEQ ID NO: 94
  REGION 1..140: note = Description of Artificial Sequence: Synthetic polypeptide

SEQ ID NO: 1473 - protein, 140 aa, synthetic construct
  REGION 1..140: note = Description of Artificial Sequence: Synthetic polypeptide
EVQLVESGGALVKPGGSLRLSCAASGFTFSKAWYSWVRQAPGKGLEWVGRIKSVTDGETTDYAAPVKGRFTISRDDSKSTLYLQMNSLKTEDTAVYYCTSSFCCRGGSCPSHDTSYCGGQYKSYYYMDVWGKGTTVTVSS

SEQ ID NO: 1474 - protein, 140 aa, synthetic construct; identical to SEQ ID NO: 78
  REGION 1..140: note = Description of Artificial Sequence: Synthetic polypeptide

SEQ ID NO: 1475 - protein, 140 aa, synthetic construct; identical to SEQ ID NO: 78
  REGION 1..140: note = Description of Artificial Sequence: Synthetic polypeptide

SEQ ID NO: 1476 - protein, 140 aa, synthetic construct
  REGION 1..140: note = Description of Artificial Sequence: Synthetic polypeptide
EVQLVESGGGLVQPGPSLRLSCTASGFTFSKAWMSWVRQAPGKGLEWVGFIKSVTDGETTEYAASVKGRFTISRDDSKSIAYLQMNSLKTEDTAVYYCTSSFCCRGGSCPSHDTSYCGGQYKSYYYMDVWGKGTTVTVSS

SEQ ID NO: 1477 - protein, 140 aa, synthetic construct
  REGION 1..140: note = Description of Artificial Sequence: Synthetic polypeptide
EVQLVESGGALVKPGGSLRLSCAASGFTFSKAWMSWVRQAPGKGLEWVGRIKSVTDGETTDYAAPVKGRFTISRDDSKSTLYLQMNSLKTEDTAVYYCTSSYCCRSGSCPSSDTSYCNGQFKSYYYMDPWGKGTTVTVSS

SEQ ID NO: 1478 - protein, 140 aa, synthetic construct
  REGION 1..140: note = Description of Artificial Sequence: Synthetic polypeptide
EVQLVESGGALVKPGGSLRLSCAASGFTFSKAWMSWVRQAPGKGLEWVGRIKSVTDGETTDYAAPVKGRFTISRDDSKSTLYLQMNSLKTEDTAVYYCTSSFCCRSGSCPSSDTSYCNGQYKSYYYVNIWGKGTTVTVSS

SEQ ID NO: 1479 - protein, 140 aa, synthetic construct
  REGION 1..140: note = Description of Artificial Sequence: Synthetic polypeptide
EVQLVESGGALVKPGGSLRLSCAASGFTFSKAWMSWVRQAPGKGLEWVGRIKSVTDGETTDYAAPVKGRFTISRDDSKSTLYLQMNSLKTEDTAVYYCTTSFCCRGASCPSHDTSYCAGSYKSYYYVNIWGKGTTVTVSS

SEQ ID NO: 1480 - protein, 140 aa, synthetic construct
  REGION 1..140: note = Description of Artificial Sequence: Synthetic polypeptide
EVQLVESGGALVKPGGSLRLSCAASGFTFSKAWMSWVRQAPGKGLEWVGRIKSVTDGETTDYAAPVKGRFTISRDDSKSTLYLQMNSLKTEDTAVYYCTSAFCCRGKSCPSSDTSYCGGQYPSYYYVNIWGKGTTVTVSS

SEQ ID NO: 1481 - protein, 140 aa, synthetic construct
  REGION 1..140: note = Description of Artificial Sequence: Synthetic polypeptide
EVQLVESGGALVKPGGSLRLSCAASGFTFSKAWMSWVRQAPGKGLEWVGRIKSVTDGETTDYAAPVKGRFTISRDDSKSTLYLQMNSLKTEDTAVYYCTSAFCCRGKSCPSHDTSFCGGQDKRYYYVNIWGKGTTVTVSS

SEQ ID NO: 1482 - protein, 140 aa, synthetic construct
  REGION 1..140: note = Description of Artificial Sequence: Synthetic polypeptide
EVQLVESGGALVKPGGSLRLSCAASGFTFSKAWMSWVRQAPGKGLEWVGRIKSVTDGETTDYAAPVKGRFTISRDDSKSTLYLQMNSLKTEDTAVYYCTSAFCCRGGNCPSHETSYCNGQNKQYYYMDVWGKGTTVTVSS

SEQ ID NO: 1483 - protein, 140 aa, synthetic construct
  REGION 1..140: note = Description of Artificial Sequence: Synthetic polypeptide
EVQLVESGGALVKPGGSLRLSCAASGFTFSKAWMSWVRQAPGKGLEWVGRIKSVTDGETTDYAAPVKGRFTISRDDSKSTLYLQMNSLKTEDTAVYYCTSSFCCRGNQCPSSDTSFCGGQDKRYYYMDPWGKGTTVTVSS

SEQ ID NO: 1484 - protein, 140 aa, synthetic construct
  REGION 1..140: note = Description of Artificial Sequence: Synthetic polypeptide
EVQLVESGGALVKPGGSLRLSCAASGFTFSKAWMSWVRQAPGKGLEWVGRIKSVTDGETTDYAAPVKGRFTISRDDSKSTLYLQMNSLKTEDTAVYYCTTSFCCRGNQCPSHETSYCGGYYKSYFYMDVWGKGTTVTVSS

SEQ ID NO: 1485 - protein, 140 aa, synthetic construct
  REGION 1..140: note = Description of Artificial Sequence: Synthetic polypeptide
EVQLVESGGALVKPGGSLRLSCAASGFTFSKAWMSWVRQAPGKGLEWVGRIKSVTDGETTDYAAPVKGRFTISRDDSKSTLYLQMNSLKTEDTAVYYCTSSYCCRGKQCPSHDTSYCAGQYADYYYMDVWGKGTTVTVSS

SEQ ID NO: 1486 - protein, 140 aa, synthetic construct
  REGION 1..140: note = Description of Artificial Sequence: Synthetic polypeptide
EVQLVESGGALVKPGGSLRLSCAASGFTFSKAWMSWVRQAPGKGLEWVGRIKSVTDGETTDYAAPVKGRFTISRDDSKSTLYLQMNSLKTEDTAVYYCISSFCCRGKQCPSSDTSYCNGQYADYYYMDVWGKGTTVTVSS

SEQ ID NO: 1487 - protein, 140 aa, synthetic construct
  REGION 1..140: note = Description of Artificial Sequence: Synthetic polypeptide
EVQLVESGGALVKPGGSLRLSCAASGFTFSKAWMSWVRQAPGKGLEWVGRIKSVTDGETTDYAAPVKGRFTISRDDSKSTLYLQMNSLKTEDTAVYYCTSSFCCRGKQCPSSDTSYCNGQYADYYYVNIWGKGTTVTVSS

SEQ ID NO: 1488 - protein, 140 aa, synthetic construct
  REGION 1..140: note = Description of Artificial Sequence: Synthetic polypeptide
EVQLVESGGALVKPGGSLRLSCAASGFTFSKAWMSWVRQAPGKGLEWVGRIKSVTDGETTDYAAPVKGRFTISRDDSKSTLYLQMNSLKTEDTAVYYCISSFCCRGKQCPSSDTSFCGGQDKRYYFMDVWGKGTTVTVSS

SEQ ID NO: 1489 - protein, 140 aa, synthetic construct
  REGION 1..140: note = Description of Artificial Sequence: Synthetic polypeptide
EVQLVESGGALVKPGGSLRLSCAASGFTFSKAWMSWVRQAPGKGLEWVGRIKSVTDGETTDYAAPVKGRFTISRDDSKSTLYLQMNSLKTEDTAVYYCTSAFCCRGKQCPSSDTSYCGGQYASFYYMDVWGKGTTVTVSS

SEQ ID NO: 1490 - protein, 140 aa, synthetic construct
  REGION 1..140: note = Description of Artificial Sequence: Synthetic polypeptide
EVQLVESGGALVKPGGSLRLSCAASGFTFSKAWMSWVRQAPGKGLEWVGRIKSVTDGETTDYAAPVKGRFTISRDDSKSTLYLQMNSLKTEDTAVYYCTSSFCCQGNNCPSSDTSYCGGYYKDYYYMDVWGKGTTVTVSS

SEQ ID NO: 1491 - protein, 140 aa, synthetic construct
  REGION 1..140: note = Description of Artificial Sequence: Synthetic polypeptide
EVQLVESGGALVKPGGSLRLSCAASGFTFSKAWMSWVRQAPGKGLEWVGRIKSVTDGETTDYAAPVKGRFTISRDDSKSTLYLQMNSLKTEDTAVYYCTSSFCCQGNNCPSHDTSYCGGQYKSYYYVNIWGKGTTVTVSS

SEQ ID NO: 1492 - protein, 140 aa, synthetic construct
  REGION 1..140: note = Description of Artificial Sequence: Synthetic polypeptide
EVQLVESGGALVKPGGSLRLSCAASGFTFSKAWMSWVRQAPGKGLEWVGRIKSVTDGETTDYAAPVKGRFTISRDDSKSTLYLQMNSLKTEDTAVYYCTSSFCCQGKNCPSHETSYCGGQYADYYYMDVWGKGTTVTVSS

SEQ ID NO: 1493 - protein, 140 aa, synthetic construct
  REGION 1..140: note = Description of Artificial Sequence: Synthetic polypeptide
EVQLVESGGALVKPGGSLRLSCAASGFTFSKAWMSWVRQAPGKGLEWVGRIKSVTDGETTDYAAPVKGRFTISRDDSKSTLYLQMNSLKTEDTAVYYCTTSFCCHGNSCPSSDTSYCGGQNKQYYYMDVWGKGTTVTVSS

SEQ ID NO: 1494 - protein, 140 aa, synthetic construct
  REGION 1..140: note = Description of Artificial Sequence: Synthetic polypeptide
EVQLVESGGALVKPGGSLRLSCAASGFTFSKAWMSWVRQAPGKGLEWVGRIKSVTDGETTDYAAPVKGRFTISRDDSKSTLYLQMNSLKTEDTAVYYCISSFCCHGNSCPSHDTSYCNGQNKQYYYMDVWGKGTTVTVSS

SEQ ID NO: 1495 - protein, 140 aa, synthetic construct
  REGION 1..140: note = Description of Artificial Sequence: Synthetic polypeptide
EVQLVESGGALVKPGGSLRLSCAASGFTFSKAWMSWVRQAPGKGLEWVGRIKSVTDGETTDYAAPVKGRFTISRDDSKSTLYLQMNSLKTEDTAVYYCISSFCCHSNNCPSSDTSYCNGQYKQYYYMDVWGKGTTVTVSS

SEQ ID NO: 1496 - protein, 140 aa, synthetic construct
  REGION 1..140: note = Description of Artificial Sequence: Synthetic polypeptide
EVQLVESGGALVKPGGSLRLSCAASGFTFSKAWMSWVRQAPGKGLEWVGRIKSVTDGETTDYAAPVKGRFTISRDDSKSTLYLQMNSLKTEDTAVYYCTSSFCCHSNNCPSHDTSYCGGQYKSYYYVNIWGKGTTVTVSS

SEQ ID NO: 1497 - protein, 140 aa, synthetic construct
  REGION 1..140: note = Description of Artificial Sequence: Synthetic polypeptide
EVQLVESGGALVKPGGSLRLSCAASGFTFSKAWMSWVRQAPGKGLEWVGRIKSVTDGETTDYAAPVKGRFTISRDDSKSTLYLQMNSLKTEDTAVYYCISSFACHSNNCPSSDTSYVNGYYKQYYFMDVWGKGTTVTVSS

SEQ ID NO: 1498 - protein, 140 aa, synthetic construct
  REGION 1..140: note = Description of Artificial Sequence: Synthetic polypeptide
EVQLVESGGALVKPGGSLRLSCAASGFTFSKAWMSWVRQAPGKGLEWVGRIKSVTDGETTDYAAPVKGRFTISRDDSKSTLYLQMNSLKTEDTAVYYCTSSFCCHSNNCPSSDTSYCNGQYKQYYYVNIWGKGTTVTVSS

SEQ ID NO: 1499 - protein, 140 aa, synthetic construct
  REGION 1..140: note = Description of Artificial Sequence: Synthetic polypeptide
EVQLVESGGALVKPGGSLRLSCAASGFTFSKAWMSWVRQAPGKGLEWVGRIKSVTDGETTDYAAPVKGRFTISRDDSKSTLYLQMNSLKTEDTAVYYCTSSFCCLGKACLSHDTSYCGGQYASYYYVNIWGKGTTVTVSS

SEQ ID NO: 1500 - protein, 140 aa, synthetic construct
  REGION 1..140: note = Description of Artificial Sequence: Synthetic polypeptide
EVQLVESGGALVKPGGSLRLSCAASGFTFSKAWMSWVRQAPGKGLEWVGRIKSVTDGETTDYAAPVKGRFTISRDDSKSTLYLQMNSLKTEDTAVYYCTSSFCCLGKACLSSDTSYCGGYYASYYFVNIWGKGTTVTVSS

SEQ ID NO: 1501 - protein, 140 aa, synthetic construct
  REGION 1..140: note = Description of Artificial Sequence: Synthetic polypeptide
EVQLVESGGALVKPGGSLRLSCAASGFTFSKAWMSWVRQAPGKGLEWVGRIKSVTDGETTDYAAPVKGRFTISRDDSKSTLYLQMNSLKTEDTAVYYCTSSFACLGKACLSSDTSYVGGYYASYYFVNIWGKGTTVTVSS

SEQ ID NO: 1502 - protein, 140 aa, synthetic construct
  REGION 1..140: note = Description of Artificial Sequence: Synthetic polypeptide
EVQLVESGGALVKPGGSLRLSCAASGFTFSKAWMSWVRQAPGKGLEWVGRIKSVTDGETTDYAAPVKGRFTISRDDSKSTLYLQMNSLKTEDTAVYYCTSSYCCLGNSCPSSDTSYCGGQFKSYYYMDPWGKGTTVTVSS

SEQ ID NO: 1503 - protein, 140 aa, synthetic construct
  REGION 1..140: note = Description of Artificial Sequence: Synthetic polypeptide
EVQLVESGGALVKPGGSLRLSCAASGFTFSKAWMSWVRQAPGKGLEWVGRIKSVTDGETTDYAAPVKGRFTISRDDSKSTLYLQMNSLKTEDTAVYYCTSSYCCLGNSCPSSDTSFCGGQDKRYYYMDPWGKGTTVTVSS

SEQ ID NO: 1504 - protein, 140 aa, synthetic construct
  REGION 1..140: note = Description of Artificial Sequence: Synthetic polypeptide
EVQLVESGGALVKPGGSLRLSCAASGFTFSKAWMSWVRQAPGKGLEWVGRIKSVTDGETTDYAAPVKGRFTISRDDSKSTLYLQMNSLKTEDTAVYYCISSFCCLGGNCPSSETSYCGNQYPSYYYMDVWGKGTTVTVSS

SEQ ID NO: 1505 - protein, 140 aa, synthetic construct
  REGION 1..140: note = Description of Artificial Sequence: Synthetic polypeptide
EVQLVESGGALVKPGGSLRLSCAASGFTFSKAWMSWVRQAPGKGLEWVGRIKSVTDGETTDYAAPVKGRFTISRDDSKSTLYLQMNSLKTEDTAVYYCISSFCCLGGNCPSSETSYCGNYYPSYFYMDVWGKGTTVTVSS

SEQ ID NO: 1506 - protein, 140 aa, synthetic construct
  REGION 1..140: note = Description of Artificial Sequence: Synthetic polypeptide
EVQLVESGGALVKPGGSLRLSCAASGFTFSKAWMSWVRQAPGKGLEWVGRIKSVTDGETTDYAAPVKGRFTISRDDSKSTLYLQMNSLKTEDTAVYYCTSSFCCLGGNCPSSETSYCGNQYPSYYYVNIWGKGTTVTVSS

SEQ ID NO: 1507 - protein, 140 aa, synthetic construct
  REGION 1..140: note = Description of Artificial Sequence: Synthetic polypeptide
EVQLVESGGALVKPGGSLRLSCAASGFTFSKAWMSWVRQAPGKGLEWVGRIKSVTDGETTDYAAPVKGRFTISRDDSKSTLYLQMNSLKTEDTAVYYCTTSFACRGNQCPSHETSYVGGYYKSYFYMDVWGKGTTVTVSS

SEQ ID NO: 1508 - protein, 140 aa, synthetic construct
  REGION 1..140: note = Description of Artificial Sequence: Synthetic polypeptide
EVQLVESGGALVKPGGSLRLSCAASGFTFSKAWMSWVRQAPGKGLEWVGRIKSVTDGETTDYAAPVKGRFTISRDDSKSTLYLQMNSLKTEDTAVYYCTTSFACRGNQCPSSETSYVGGYYKSYFFMDVWGKGTTVTVSS

SEQ ID NO: 1509 - protein, 140 aa, synthetic construct
  REGION 1..140: note = Description of Artificial Sequence: Synthetic polypeptide
EVQLVESGGALVKPGGSLRLSCAASGFTFSKAWMSWVRQAPGKGLEWVGRIKSVTDGETTDYAAPVKGRFTISRDDSKSTLYLQMNSLKTEDTAVYYCISSFACRGKQCPSSDTSYVGGQFKSYYFMDVWGKGTTVTVSS

SEQ ID NO: 1510 - protein, 140 aa, synthetic construct
  REGION 1..140: note = Description of Artificial Sequence: Synthetic polypeptide
EVQLVESGGALVKPGGSLRLSCAASGFTFAKAWMSWVRQAPGKGLEWVGRIKAADDGKQTDYAAPVKGRFTISRDDSKSTLYLQMNSLKTEDTAVYYCTSSFCCRGGSCLSHDTSYCGGQYKSYYWMDVWGKGTTVTVSS

SEQ ID NO: 1511 - protein, 140 aa, synthetic construct
  REGION 1..140: note = Description of Artificial Sequence: Synthetic polypeptide
EVQLVESGGALVKPGGSLRLSCAASGFTYAKAWMSWVRQAPGKGLEWVGRIKSVQDGEQTDYAAPVKGRFTISRDDSKSTLYLQMNSLKTEDTAVYYCTSSYCCLGGSCPSHDTSYCGGSYKSYYYMDVWGKGTTVTVSS

SEQ ID NO: 1512 - protein, 140 aa, synthetic construct
  REGION 1..140: note = Description of Artificial Sequence: Synthetic polypeptide
EVQLVESGGALVKPGGSLRLSCAASGFDASKAWFTWVRQAPGKGLEWVGRIKSVTDGETTDYAAPVKGRFTISRDDSKSTLYLQMNSLKTEDTAVYYCTSSFCCRGGSCPSHDTSYCGGQNKQYYYMDVWGKGTTVTVSS

SEQ ID NO: 1513 - protein, 140 aa, synthetic construct
  REGION 1..140: note = Description of Artificial Sequence: Synthetic polypeptide
EVQLVESGGALVKPGGSLRLSCAASGFDASKAWFTWVRQAPGKGLEWVGRIKSVTDGETTDYAAPVKGRFTISRDDSKSTLYLQMNSLKTEDTAVYYCTSSFACRGGSCPSHDTSYVGGQYKSYYYMDVWGKGTTVTVSS

SEQ ID NO: 1514 - protein, 140 aa, synthetic construct
  REGION 1..140: note = Description of Artificial Sequence: Synthetic polypeptide
EVQLVESGGALVKPGGSLRLSCAASGFDASKAWFTWVRQAPGKGLEWVGRIKSVTDGETTDYAAPVKGRFTISRDDSKSTLYLQMNSLKTEDTAVYYCTSSYCCLGGSCPSHDTSYCGGSYKSYYYMDVWGKGTTVTVSS

SEQ ID NO: 1515 - protein, 140 aa, synthetic construct
  REGION 1..140: note = Description of Artificial Sequence: Synthetic polypeptide
EVQLVESGGALVKPGGSLRLSCAASGFDASKAWFTWVRQAPGKGLEWVGRIKSVTDGETTDYAAPVKGRFTISRDDSKSTLYLQMNSLKTEDTAVYYCTSSFCCRGKSCPSHDTSYCGGQYASYYYMDVWGKGTTVTVSS

SEQ ID NO: 1516 - protein, 140 aa, synthetic construct
  REGION 1..140: note = Description of Artificial Sequence: Synthetic polypeptide
EVQLVESGGALVKPGGSLRLSCAASGFTFSKAWMSWVRQAPGKGLEWVGRIKAADDGKQTDYAAPVKGRFTISRDDSKSTLYLQMNSLKTEDTAVYYCTSSFCCRGGNCPSHETSYCGNQYKSYYYMDVWGKGTTVTVSS

SEQ ID NO: 1517 - protein, 140 aa, synthetic construct
  REGION 1..140: note = Description of Artificial Sequence: Synthetic polypeptide
EVQLVESGGALVKPGGSLRLSCAASGFTFSKAWMSWVRQAPGKGLEWVGRIKAADDGKQTDYAAPVKGRFTISRDDSKSTLYLQMNSLKTEDTAVYYCTSSFCCRSGSCPSSDTSYCNGQYKSYYYMDVWGKGTTVTVSS

SEQ ID NO: 1518 - protein, 140 aa, synthetic construct
  REGION 1..140: note = Description of Artificial Sequence: Synthetic polypeptide
EVQLVESGGALVKPGGSLRLSCAASGFTFSKAWMSWVRQAPGKGLEWVGRIKAADDGKQTDYAAPVKGRFTISRDDSKSTLYLQMNSLKTEDTAVYYCTSSFCCRGGSCPSHDTSYCGGQYKSYYYVNIWGKGTTVTVSS

SEQ ID NO: 1519 - protein, 140 aa, synthetic construct
  REGION 1..140: note = Description of Artificial Sequence: Synthetic polypeptide
EVQLVESGGALVKPGGSLRLSCAASGFTFSKAWMSWVRQAPGKGLEWVGRIKAADDGKQTDYAAPVKGRFTISRDDSKSTLYLQMNSLKTEDTAVYYCTTSFCCRGASCPSHDTSYCAGSYKSYYYMDVWGKGTTVTVSS

SEQ ID NO: 1520 - protein, 140 aa, synthetic construct
  REGION 1..140: note = Description of Artificial Sequence: Synthetic polypeptide
EVQLVESGGALVKPGGSLRLSCAASGFTFSKAWMSWVRQAPGKGLEWVGRIKAADDGKQTDYAAPVKGRFTISRDDSKSTLYLQMNSLKTEDTAVYYCISSFCCRGNSCPSSDTSYCNGQYKSYYYMDVWGKGTTVTVSS

SEQ ID NO: 1521 - protein, 140 aa, synthetic construct
  REGION 1..140: note = Description of Artificial Sequence: Synthetic polypeptide
EVQLVESGGALVKPGGSLRLSCAASGFTFSKAWMSWVRQAPGKGLEWVGRIKAVTDGHTTDYAAPVKGRFTISRDDSKSTLYLQMNSLKTEDTAVYYCTSSFCCRGGSCPSHDTSYCGGQYKSYYYMDVWGKGTTVTVSS

SEQ ID NO: 1522 - protein, 140 aa, synthetic construct
  REGION 1..140: note = Description of Artificial Sequence: Synthetic polypeptide
EVQLVESGGALVKPGGSLRLSCAASGFVYSKAWMSWVRQAPGKGLEWVGRIKSVTDGQATDYAAPVKGRFTISRDDSKSTLYLQMNSLKTEDTAVYYCTSSFCCRGGSCPSHDTSYCGGQYKSYYYMDVWGKGTTVTVSS

SEQ ID NO: 1523 - protein, 140 aa, synthetic construct
  REGION 1..140: note = Description of Artificial Sequence: Synthetic polypeptide
EVQLVESGGALVKPGGSLRLSCAASGFVFSKAWMSWVRQAPGKGLEWVGRIKSVTDGETTDYAAPVKGRFTISRDDSKSTLYLQMNSLKTEDTAVYYCTSSFCCRGKSCPSHDTSYCGGQYASYYYMDVWGKGTTVTVSS

SEQ ID NO: 1524 - protein, 140 aa, synthetic construct
  REGION 1..140: note = Description of Artificial Sequence: Synthetic polypeptide
EVQLVESGGALVKPGGSLRLSCAASGFTFAKAWMSWVRQAPGKGLEWVGRIKSVTDAETTDYAAPVKGRFTISRDDSKSTLYLQMNSLKTEDTAVYYCTSSFCCRSGSCPSSDTSYCNGQYKSYYWMDVWGKGTTVTVSS

SEQ ID NO: 1525 - protein, 140 aa, synthetic construct
  REGION 1..140: note = Description of Artificial Sequence: Synthetic polypeptide
EVQLVESGGALVKPGGSLRLSCAASGFTYAKAWFTWVRQAPGKGLEWVGRIKSTSDGGITDYAAPVKGRFTISRDDSKSTLYLQMNSLKTEDTAVYYCTSSFCCRGGSCPSHDTSFCGGQYKSYYYMDVWGKGTTVTVSS

SEQ ID NO: 1526 - protein, 140 aa, synthetic construct
  REGION 1..140: note = Description of Artificial Sequence: Synthetic polypeptide
EVQLVESGGALVKPGGSLRLSCAASGFTFSKAWMSWVRQAPGKGLEWVGRIKSVSDGETTDYAAPVKGRFTISRDDSKSTLYLQMNSLKTEDTAVYYCTSSFCCRGGSCPSRDTSYCGGQYKSYYFMDVWGKGTTVTVSS

SEQ ID NO: 1527 - protein, 110 aa, synthetic construct
  REGION 1..110: note = Description of Artificial Sequence: Synthetic polypeptide
QSVLTQAPSASETPGQRVIISCSGSSSNIGSSSVSWYQQLPGTAPKLLIYKNNQRPSGVPDRFSGSKSGTSASLAISGLRSEDEADYYCSTWDESLSVRVFGGGTKLTVL

SEQ ID NO: 1528 - protein, 110 aa, synthetic construct; identical to SEQ ID NO: 151
  REGION 1..110: note = Description of Artificial Sequence: Synthetic polypeptide

SEQ ID NO: 1529 - protein, 110 aa, synthetic construct; identical to SEQ ID NO: 151
  REGION 1..110: note = Description of Artificial Sequence: Synthetic polypeptide

SEQ ID NO: 1530 - protein, 110 aa, synthetic construct; identical to SEQ ID NO: 151
  REGION 1..110: note = Description of Artificial Sequence: Synthetic polypeptide

SEQ ID NO: 1531 - protein, 110 aa, synthetic construct; identical to SEQ ID NO: 123
  REGION 1..110: note = Description of Artificial Sequence: Synthetic polypeptide

SEQ ID NO: 1532 - protein, 110 aa, synthetic construct; identical to SEQ ID NO: 123
  REGION 1..110: note = Description of Artificial Sequence: Synthetic polypeptide

SEQ ID NO: 1533 - protein, 110 aa, synthetic construct; identical to SEQ ID NO: 123
  REGION 1..110: note = Description of Artificial Sequence: Synthetic polypeptide

SEQ ID NO: 1534 - protein, 110 aa, synthetic construct; identical to SEQ ID NO: 123
  REGION 1..110: note = Description of Artificial Sequence: Synthetic polypeptide

SEQ ID NO: 1535 - protein, 110 aa, synthetic construct; identical to SEQ ID NO: 123
  REGION 1..110: note = Description of Artificial Sequence: Synthetic polypeptide

SEQ ID NO: 1536 - protein, 110 aa, synthetic construct; identical to SEQ ID NO: 123
  REGION 1..110: note = Description of Artificial Sequence: Synthetic polypeptide

SEQ ID NO: 1537 - protein, 110 aa, synthetic construct; identical to SEQ ID NO: 123
  REGION 1..110: note = Description of Artificial Sequence: Synthetic polypeptide

SEQ ID NO: 1538 - protein, 110 aa, synthetic construct; identical to SEQ ID NO: 123
  REGION 1..110: note = Description of Artificial Sequence: Synthetic polypeptide

SEQ ID NO: 1539 - protein, 110 aa, synthetic construct; identical to SEQ ID NO: 123
  REGION 1..110: note = Description of Artificial Sequence: Synthetic polypeptide

SEQ ID NO: 1540 - protein, 110 aa, synthetic construct; identical to SEQ ID NO: 123
  REGION 1..110: note = Description of Artificial Sequence: Synthetic polypeptide

SEQ ID NO: 1541 - protein, 110 aa, synthetic construct; identical to SEQ ID NO: 123
  REGION 1..110: note = Description of Artificial Sequence: Synthetic polypeptide

SEQ ID NO: 1542 - protein, 110 aa, synthetic construct; identical to SEQ ID NO: 123
  REGION 1..110: note = Description of Artificial Sequence: Synthetic polypeptide

SEQ ID NO: 1543 - protein, 110 aa, synthetic construct; identical to SEQ ID NO: 123
  REGION 1..110: note = Description of Artificial Sequence: Synthetic polypeptide

SEQ ID NO: 1544 - protein, 110 aa, synthetic construct; identical to SEQ ID NO: 123
  REGION 1..110: note = Description of Artificial Sequence: Synthetic polypeptide

SEQ ID NO: 1545 - protein, 110 aa, synthetic construct; identical to SEQ ID NO: 123
  REGION 1..110: note = Description of Artificial Sequence: Synthetic polypeptide

SEQ ID NO: 1546 - protein, 110 aa, synthetic construct; identical to SEQ ID NO: 123
  REGION 1..110: note = Description of Artificial Sequence: Synthetic polypeptide

SEQ ID NO: 1547 - protein, 110 aa, synthetic construct; identical to SEQ ID NO: 123
  REGION 1..110: note = Description of Artificial Sequence: Synthetic polypeptide

SEQ ID NO: 1548 - protein, 110 aa, synthetic construct; identical to SEQ ID NO: 123
  REGION 1..110: note = Description of Artificial Sequence: Synthetic polypeptide

SEQ ID NO: 1549 - protein, 110 aa, synthetic construct; identical to SEQ ID NO: 123
  REGION 1..110: note = Description of Artificial Sequence: Synthetic polypeptide

SEQ ID NO: 1550 - protein, 110 aa, synthetic construct; identical to SEQ ID NO: 123
  REGION 1..110: note = Description of Artificial Sequence: Synthetic polypeptide

SEQ ID NO: 1551 - protein, 110 aa, synthetic construct; identical to SEQ ID NO: 123
  REGION 1..110: note = Description of Artificial Sequence: Synthetic polypeptide

SEQ ID NO: 1552 - protein, 110 aa, synthetic construct; identical to SEQ ID NO: 123
  REGION 1..110: note = Description of Artificial Sequence: Synthetic polypeptide

SEQ ID NO: 1553 - protein, 110 aa, synthetic construct; identical to SEQ ID NO: 123
  REGION 1..110: note = Description of Artificial Sequence: Synthetic polypeptide

SEQ ID NO: 1554 - protein, 110 aa, synthetic construct; identical to SEQ ID NO: 123
  REGION 1..110: note = Description of Artificial Sequence: Synthetic polypeptide

SEQ ID NO: 1555 - protein, 110 aa, synthetic construct; identical to SEQ ID NO: 123
  REGION 1..110: note = Description of Artificial Sequence: Synthetic polypeptide

SEQ ID NO: 1556 - protein, 110 aa, synthetic construct; identical to SEQ ID NO: 123
  REGION 1..110: note = Description of Artificial Sequence: Synthetic polypeptide

SEQ ID NO: 1557 - protein, 110 aa, synthetic construct; identical to SEQ ID NO: 123
  REGION 1..110: note = Description of Artificial Sequence: Synthetic polypeptide

SEQ ID NO: 1558 - protein, 110 aa, synthetic construct; identical to SEQ ID NO: 123
  REGION 1..110: note = Description of Artificial Sequence: Synthetic polypeptide

SEQ ID NO: 1559 - protein, 110 aa, synthetic construct; identical to SEQ ID NO: 123
  REGION 1..110: note = Description of Artificial Sequence: Synthetic polypeptide

SEQ ID NO: 1560 - protein, 110 aa, synthetic construct; identical to SEQ ID NO: 123
  REGION 1..110: note = Description of Artificial Sequence: Synthetic polypeptide

SEQ ID NO: 1561 - protein, 110 aa, synthetic construct; identical to SEQ ID NO: 123
  REGION 1..110: note = Description of Artificial Sequence: Synthetic polypeptide

SEQ ID NO: 1562 - protein, 110 aa, synthetic construct; identical to SEQ ID NO: 123
  REGION 1..110: note = Description of Artificial Sequence: Synthetic polypeptide

SEQ ID NO: 1563 - protein, 110 aa, synthetic construct; identical to SEQ ID NO: 123
  REGION 1..110: note = Description of Artificial Sequence: Synthetic polypeptide

SEQ ID NO: 1564 - protein, 110 aa, synthetic construct; identical to SEQ ID NO: 123
  REGION 1..110: note = Description of Artificial Sequence: Synthetic polypeptide

SEQ ID NO: 1565 - protein, 110 aa, synthetic construct; identical to SEQ ID NO: 123
  REGION 1..110: note = Description of Artificial Sequence: Synthetic polypeptide

SEQ ID NO: 1566 - protein, 110 aa, synthetic construct; identical to SEQ ID NO: 123
  REGION 1..110: note = Description of Artificial Sequence: Synthetic polypeptide

SEQ ID NO: 1567 - protein, 110 aa, synthetic construct; identical to SEQ ID NO: 123
  REGION 1..110: note = Description of Artificial Sequence: Synthetic polypeptide

SEQ ID NO: 1568 - protein, 110 aa, synthetic construct; identical to SEQ ID NO: 123
  REGION 1..110: note = Description of Artificial Sequence: Synthetic polypeptide

SEQ ID NO: 1569 - protein, 110 aa, synthetic construct; identical to SEQ ID NO: 123
  REGION 1..110: note = Description of Artificial Sequence: Synthetic polypeptide

SEQ ID NO: 1570 - protein, 110 aa, synthetic construct; identical to SEQ ID NO: 123
  REGION 1..110: note = Description of Artificial Sequence: Synthetic polypeptide

SEQ ID NO: 1571 - protein, 110 aa, synthetic construct; identical to SEQ ID NO: 123
  REGION 1..110: note = Description of Artificial Sequence: Synthetic polypeptide

SEQ ID NO: 1572 - protein, 110 aa, synthetic construct; identical to SEQ ID NO: 123
  REGION 1..110: note = Description of Artificial Sequence: Synthetic polypeptide

SEQ ID NO: 1573 - protein, 110 aa, synthetic construct; identical to SEQ ID NO: 123
  REGION 1..110: note = Description of Artificial Sequence: Synthetic polypeptide

SEQ ID NO: 1574 - protein, 110 aa, synthetic construct; identical to SEQ ID NO: 123
  REGION 1..110: note = Description of Artificial Sequence: Synthetic polypeptide

SEQ ID NO: 1575 - protein, 110 aa, synthetic construct; identical to SEQ ID NO: 123
  REGION 1..110: note = Description of Artificial Sequence: Synthetic polypeptide

SEQ ID NO: 1576 - protein, 110 aa, synthetic construct; identical to SEQ ID NO: 123
  REGION 1..110: note = Description of Artificial Sequence: Synthetic polypeptide

SEQ ID NO: 1577 - protein, 110 aa, synthetic construct; identical to SEQ ID NO: 123
  REGION 1..110: note = Description of Artificial Sequence: Synthetic polypeptide

SEQ ID NO: 1578 - protein, 110 aa, synthetic construct; identical to SEQ ID NO: 123
  REGION 1..110: note = Description of Artificial Sequence: Synthetic polypeptide

SEQ ID NO: 1579 - protein, 110 aa, synthetic construct; identical to SEQ ID NO: 123
  REGION 1..110: note = Description of Artificial Sequence: Synthetic polypeptide

SEQ ID NO: 1580 - protein, 110 aa, synthetic construct; identical to SEQ ID NO: 123
  REGION 1..110: note = Description of Artificial Sequence: Synthetic polypeptide

SEQ ID NO: 1581 - protein, 110 aa, synthetic construct; identical to SEQ ID NO: 123
  REGION 1..110: note = Description of Artificial Sequence: Synthetic polypeptide

SEQ ID NO: 1582 - protein, 110 aa, synthetic construct; identical to SEQ ID NO: 123
  REGION 1..110: note = Description of Artificial Sequence: Synthetic polypeptide

SEQ ID NO: 1583 - protein, 110 aa, synthetic construct; identical to SEQ ID NO: 123
  REGION 1..110: note = Description of Artificial Sequence: Synthetic polypeptide

SEQ ID NO: 1584 - protein, 110 aa, synthetic construct; identical to SEQ ID NO: 123
  REGION 1..110: note = Description of Artificial Sequence: Synthetic polypeptide

SEQ ID NO: 1585 - protein, 110 aa, synthetic construct; identical to SEQ ID NO: 123
  REGION 1..110: note = Description of Artificial Sequence: Synthetic polypeptide

SEQ ID NO: 1586 - protein, 110 aa, synthetic construct; identical to SEQ ID NO: 123
  REGION 1..110: note = Description of Artificial Sequence: Synthetic polypeptide

SEQ ID NO: 1587 - protein, 110 aa, synthetic construct; identical to SEQ ID NO: 123
  REGION 1..110: note = Description of Artificial Sequence: Synthetic polypeptide

SEQ ID NO: 1588 - protein, 110 aa, synthetic construct; identical to SEQ ID NO: 123
  REGION 1..110: note = Description of Artificial Sequence: Synthetic polypeptide

SEQ ID NO: 1589 - protein, 110 aa, synthetic construct; identical to SEQ ID NO: 123
  REGION 1..110: note = Description of Artificial Sequence: Synthetic polypeptide

SEQ ID NO: 1590 - protein, 110 aa, synthetic construct; identical to SEQ ID NO: 123
  REGION 1..110: note = Description of Artificial Sequence: Synthetic polypeptide

SEQ ID NO: 1591 - protein, 110 aa, synthetic construct; identical to SEQ ID NO: 123
  REGION 1..110: note = Description of Artificial Sequence: Synthetic polypeptide

SEQ ID NO: 1592 - protein, 110 aa, synthetic construct; identical to SEQ ID NO: 123
  REGION 1..110: note = Description of Artificial Sequence: Synthetic polypeptide

SEQ ID NO: 1593 - protein, 110 aa, synthetic construct; identical to SEQ ID NO: 123
  REGION 1..110: note = Description of Artificial Sequence: Synthetic polypeptide

SEQ ID NO: 1594 - protein, 110 aa, synthetic construct; identical to SEQ ID NO: 123
  REGION 1..110: note = Description of Artificial Sequence: Synthetic polypeptide

SEQ ID NO: 1595 - protein, 110 aa, synthetic construct; identical to SEQ ID NO: 123
  REGION 1..110: note = Description of Artificial Sequence: Synthetic polypeptide

SEQ ID NO: 1596 - protein, 110 aa, synthetic construct; identical to SEQ ID NO: 123
  REGION 1..110: note = Description of Artificial Sequence: Synthetic polypeptide

SEQ ID NO: 1597 - protein, 110 aa, synthetic construct; identical to SEQ ID NO: 123
  REGION 1..110: note = Description of Artificial Sequence: Synthetic polypeptide

SEQ ID NO: 1598 - protein, 110 aa, synthetic construct; identical to SEQ ID NO: 123
  REGION 1..110: note = Description of Artificial Sequence: Synthetic polypeptide

SEQ ID NO: 1599 - protein, 110 aa, synthetic construct; identical to SEQ ID NO: 123
  REGION 1..110: note = Description of Artificial Sequence: Synthetic polypeptide

SEQ ID NO: 1600 - protein, 110 aa, synthetic construct; identical to SEQ ID NO: 123
  REGION 1..110: note = Description of Artificial Sequence: Synthetic polypeptide

SEQ ID NO: 1601 - protein, 110 aa, synthetic construct; identical to SEQ ID NO: 123
  REGION 1..110: note = Description of Artificial Sequence: Synthetic polypeptide

SEQ ID NO: 1602 - protein, 110 aa, synthetic construct; identical to SEQ ID NO: 123
  REGION 1..110: note = Description of Artificial Sequence: Synthetic polypeptide

SEQ ID NO: 1603 - protein, 110 aa, synthetic construct; identical to SEQ ID NO: 123
  REGION 1..110: note = Description of Artificial Sequence: Synthetic polypeptide

SEQ ID NO: 1604 - protein, 110 aa, synthetic construct; identical to SEQ ID NO: 123
  REGION 1..110: note = Description of Artificial Sequence: Synthetic polypeptide

SEQ ID NO: 1605 - protein, 110 aa, synthetic construct; identical to SEQ ID NO: 123
  REGION 1..110: note = Description of Artificial Sequence: Synthetic polypeptide

SEQ ID NO: 1606 - protein, 110 aa, synthetic construct; identical to SEQ ID NO: 123
  REGION 1..110: note = Description of Artificial Sequence: Synthetic polypeptide

SEQ ID NO: 1607 - protein, 110 aa, synthetic construct; identical to SEQ ID NO: 123
  REGION 1..110: note = Description of Artificial Sequence: Synthetic polypeptide

SEQ ID NO: 1608 - protein, 110 aa, synthetic construct; identical to SEQ ID NO: 123
  REGION 1..110: note = Description of Artificial Sequence: Synthetic polypeptide

SEQ ID NO: 1609 - protein, 110 aa, synthetic construct; identical to SEQ ID NO: 123
  REGION 1..110: note = Description of Artificial Sequence: Synthetic polypeptide

SEQ ID NO: 1610 - protein, 110 aa, synthetic construct; identical to SEQ ID NO: 123
  REGION 1..110: note = Description of Artificial Sequence: Synthetic polypeptide

SEQ ID NO: 1611 - protein, 110 aa, synthetic construct; identical to SEQ ID NO: 123
  REGION 1..110: note = Description of Artificial Sequence: Synthetic polypeptide

SEQ ID NO: 1612 - protein, 110 aa, synthetic construct; identical to SEQ ID NO: 123
  REGION 1..110: note = Description of Artificial Sequence: Synthetic polypeptide

SEQ ID NO: 1613 - protein, 110 aa, synthetic construct
  REGION 1..110: note = Description of Artificial Sequence: Synthetic polypeptide
QSVLTQPPSASGTPGQRVTISCTGSSSNIGSSSVSWYQQLPGTAPKLLIYKNNQRPSGVPDRFSGSKSGTSASLAISGLRSEDEADYYCSTWDDSLSVRVFGGGTKLTVL

SEQ ID NO: 1614 - protein, 110 aa, synthetic construct
  REGION 1..110: note = Description of Artificial Sequence: Synthetic polypeptide
QSVLTQPPSASGTPGQRVTISCSGSSTNIGSSSVSWYQQLPGTAPKLLIYKNNYRPSGVPDRFSGSKSGTSASLAISGLRSEDEADYYCSTWDDSLSVRVFGGGTKLTVL

SEQ ID NO: 1615 - protein, 110 aa, synthetic construct; identical to SEQ ID NO: 123
  REGION 1..110: note = Description of Artificial Sequence: Synthetic polypeptide

SEQ ID NO: 1616 - protein, 110 aa, synthetic construct; identical to SEQ ID NO: 1613
  REGION 1..110: note = Description of Artificial Sequence: Synthetic polypeptide

SEQ ID NO: 1617 - protein, 110 aa, synthetic construct
  REGION 1..110: note = Description of Artificial Sequence: Synthetic polypeptide
QSVLTQPPSASGTPGQRVTISCSGASSNIGSSSVSWYQQLPGTAPKLLIYKNNQRPSGVPDRFSGSKSGTSASLAISGLRSEDEADYYCSTWDDSLSVRVFGGGTKLTVL

SEQ ID NO: 1618 - protein, 110 aa, synthetic construct
  REGION 1..110: note = Description of Artificial Sequence: Synthetic polypeptide
QSVLTQPPSASGTPGQRVTISCSGSPSNIGSSSVSWYQQLPGTAPKLLIYKNNQRPSGVPDRFSGSKSGTSASLAISGLRSEDEADYYCSTWDDSLSVRVFGGGTKLTVL

SEQ ID NO: 1619 - protein, 110 aa, synthetic construct
  REGION 1..110: note = Description of Artificial Sequence: Synthetic polypeptide
QSVLTQPPSASGTPGQRVTISCSGSKSNIGSSSVSWYQQLPGTAPKLLIYKNNQRPSGVPDRFSGSKSGTSASLAISGLRSEDEADYYCSTWDDSLSVRVFGGGTKLTVL

SEQ ID NO: 1620 - protein, 110 aa, synthetic construct
  REGION 1..110: note = Description of Artificial Sequence: Synthetic polypeptide
QSVLTQPPSASGTPGQRVTISCSGSSTNIGSSSVSWYQQLPGTAPKLLIYKNNQRPSGVPDRFSGSKSGTSASLAISGLRSEDEADYYCSTWDDSLSVRVFGGGTKLTVL

SEQ ID NO: 1621 - protein, 110 aa, synthetic construct
  REGION 1..110: note = Description of Artificial Sequence: Synthetic polypeptide
QSVLTQPPSASGTPGQRVTISCSGSSSDIGSSSVSWYQQLPGTAPKLLIYKNNQRPSGVPDRFSGSKSGTSASLAISGLRSEDEADYYCSTWDDSLSVRVFGGGTKLTVL

SEQ ID NO: 1622 - protein, 110 aa, synthetic construct
  REGION 1..110: note = Description of Artificial Sequence: Synthetic polypeptide
QSVLTQPPSASGTPGQRVTISCSGSSSNIQSSSVSWYQQLPGTAPKLLIYKNNQRPSGVPDRFSGSKSGTSASLAISGLRSEDEADYYCSTWDDSLSVRVFGGGTKLTVL

SEQ ID NO: 1623 - protein, 110 aa, synthetic construct
  REGION 1..110: note = Description of Artificial Sequence: Synthetic polypeptide
QSVLTQPPSASGTPGQRVTISCSGSSSNIGHSSVSWYQQLPGTAPKLLIYKNNQRPSGVPDRFSGSKSGTSASLAISGLRSEDEADYYCSTWDDSLSVRVFGGGTKLTVL

SEQ ID NO: 1624 - protein, 110 aa, synthetic construct
  REGION 1..110: note = Description of Artificial Sequence: Synthetic polypeptide
QSVLTQPPSASGTPGQRVTISCSGSSSNIGSTSVSWYQQLPGTAPKLLIYKNNQRPSGVPDRFSGSKSGTSASLAISGLRSEDEADYYCSTWDDSLSVRVFGGGTKLTVL

SEQ ID NO: 1625 - protein, 110 aa, synthetic construct
  REGION 1..110: note = Description of Artificial Sequence: Synthetic polypeptide
QSVLTQPPSASGTPGQRVTISCSGSSSNIGSNSVSWYQQLPGTAPKLLIYKNNQRPSGVPDRFSGSKSGTSASLAISGLRSEDEADYYCSTWDDSLSVRVFGGGTKLTVL

SEQ ID NO: 1626 - protein, 110 aa, synthetic construct
  REGION 1..110: note = Description of Artificial Sequence: Synthetic polypeptide
QSVLTQPPSASGTPGQRVTISCSGSSSNIGSASVSWYQQLPGTAPKLLIYKNNQRPSGVPDRFSGSKSGTSASLAISGLRSEDEADYYCSTWDDSLSVRVFGGGTKLTVL

SEQ ID NO: 1627 - protein, 110 aa, synthetic construct
  REGION 1..110: note = Description of Artificial Sequence: Synthetic polypeptide
QSVLTQPPSASGTPGQRVTISCSGSSSNIGSSTVSWYQQLPGTAPKLLIYKNNQRPSGVPDRFSGSKSGTSASLAISGLRSEDEADYYCSTWDDSLSVRVFGGGTKLTVL

SEQ ID NO: 1628 - protein, 110 aa, synthetic construct
  REGION 1..110: note = Description of Artificial Sequence: Synthetic polypeptide
QSVLTQPPSASGTPGQRVTISCSGSSSNIGSSAVSWYQQLPGTAPKLLIYKNNQRPSGVPDRFSGSKSGTSASLAISGLRSEDEADYYCSTWDDSLSVRVFGGGTKLTVL

SEQ ID NO: 1629 - protein, 110 aa, synthetic construct
  REGION 1..110: note = Description of Artificial Sequence: Synthetic polypeptide
QSVLTQPPSASGTPGQRVTISCSGSSSNIGSSYVSWYQQLPGTAPKLLIYKNNQRPSGVPDRFSGSKSGTSASLAISGLRSEDEADYYCSTWDDSLSVRVFGGGTKLTVL

SEQ ID NO: 1630 - protein, 110 aa, synthetic construct
  REGION 1..110: note = Description of Artificial Sequence: Synthetic polypeptide
QSVLTQPPSASGTPGQRVTISCSGSSSNIGSSSTSWYQQLPGTAPKLLIYKNNQRPSGVPDRFSGSKSGTSASLAISGLRSEDEADYYCSTWDDSLSVRVFGGGTKLTVL

SEQ ID NO: 1631 - protein, 110 aa, synthetic construct
  REGION 1..110: note = Description of Artificial Sequence: Synthetic polypeptide
QSVLTQPPSASGTPGQRVTISCSGSSSNIGSSSVAWYQQLPGTAPKLLIYKNNQRPSGVPDRFSGSKSGTSASLAISGLRSEDEADYYCSTWDDSLSVRVFGGGTKLTVL

SEQ ID NO: 1632 - protein, 110 aa, synthetic construct
  REGION 1..110: note = Description of Artificial Sequence: Synthetic polypeptide
QSVLTQPPSASGTPGQRVTISCSGSSSNIGSSSVTWYQQLPGTAPKLLIYKNNQRPSGVPDRFSGSKSGTSASLAISGLRSEDEADYYCSTWDDSLSVRVFGGGTKLTVL

SEQ ID NO: 1633 - protein, 110 aa, synthetic construct
  REGION 1..110: note = Description of Artificial Sequence: Synthetic polypeptide
QSVLTQPPSASGTPGQRVTISCSGSSSNIGSSSVSWYQQLPGTAPKLLIYRNNQRPSGVPDRFSGSKSGTSASLAISGLRSEDEADYYCSTWDDSLSVRVFGGGTKLTVL

SEQ ID NO: 1634 - protein, 110 aa, synthetic construct
  REGION 1..110: note = Description of Artificial Sequence: Synthetic polypeptide
QSVLTQPPSASGTPGQRVTISCSGSSSNIGSSSVSWYQQLPGTAPKLLIYNNNQRPSGVPDRFSGSKSGTSASLAISGLRSEDEADYYCSTWDDSLSVRVFGGGTKLTVL

SEQ ID NO: 1635 - protein, 110 aa, synthetic construct
  REGION 1..110: note = Description of Artificial Sequence: Synthetic polypeptide
QSVLTQPPSASGTPGQRVTISCSGSSSNIGSSSVSWYQQLPGTAPKLLIYMNNQRPSGVPDRFSGSKSGTSASLAISGLRSEDEADYYCSTWDDSLSVRVFGGGTKLTVL

SEQ ID NO: 1636 - protein, 110 aa, synthetic construct
  REGION 1..110: note = Description of Artificial Sequence: Synthetic polypeptide
QSVLTQPPSASGTPGQRVTISCSGSSSNIGSSSVSWYQQLPGTAPKLLIYANNQRPSGVPDRFSGSKSGTSASLAISGLRSEDEADYYCSTWDDSLSVRVFGGGTKLTVL

SEQ ID NO: 1637 - protein, 110 aa, synthetic construct
  REGION 1..110: note = Description of Artificial Sequence: Synthetic polypeptide
QSVLTQPPSASGTPGQRVTISCSGSSSNIGSSSVSWYQQLPGTAPKLLIYHNNQRPSGVPDRFSGSKSGTSASLAISGLRSEDEADYYCSTWDDSLSVRVFGGGTKLTVL

SEQ ID NO: 1638 - protein, 110 aa, synthetic construct
  REGION 1..110: note = Description of Artificial Sequence: Synthetic polypeptide
QSVLTQPPSASGTPGQRVTISCSGSSSNIGSSSVSWYQQLPGTAPKLLIYKDNQRPSGVPDRFSGSKSGTSASLAISGLRSEDEADYYCSTWDDSLSVRVFGGGTKLTVL

SEQ ID NO: 1639 - protein, 110 aa, synthetic construct
  REGION 1..110: note = Description of Artificial Sequence: Synthetic polypeptide
QSVLTQPPSASGTPGQRVTISCSGSSSNIGSSSVSWYQQLPGTAPKLLIYKNTQRPSGVPDRFSGSKSGTSASLAISGLRSEDEADYYCSTWDDSLSVRVFGGGTKLTVL

SEQ ID NO: 1640 - protein, 110 aa, synthetic construct
  REGION 1..110: note = Description of Artificial Sequence: Synthetic polypeptide
QSVLTQPPSASGTPGQRVTISCSGSSSNIGSSSVSWYQQLPGTAPKLLIYKNNYRPSGVPDRFSGSKSGTSASLAISGLRSEDEADYYCSTWDDSLSVRVFGGGTKLTVL

SEQ ID NO: 1641 - protein, 110 aa, synthetic construct
  REGION 1..110: note = Description of Artificial Sequence: Synthetic polypeptide
QSVLTQPPSASGTPGQRVTISCSGSSSNIGSSSVSWYQQLPGTAPKLLIYKNNARPSGVPDRFSGSKSGTSASLAISGLRSEDEADYYCSTWDDSLSVRVFGGGTKLTVL

SEQ ID NO: 1642 - protein, 110 aa, synthetic construct
  REGION 1..110: note = Description of Artificial Sequence: Synthetic polypeptide
QSVLTQPPSASGTPGQRVTISCSGSSSNIGSSSVSWYQQLPGTAPKLLIYKNNLRPSGVPDRFSGSKSGTSASLAISGLRSEDEADYYCSTWDDSLSVRVFGGGTKLTVL

SEQ ID NO: 1643 - protein, 110 aa, synthetic construct
  REGION 1..110: note = Description of Artificial Sequence: Synthetic polypeptide
QSVLTQPPSASGTPGQRVTISCSGSSSNIGSSSVSWYQQLPGTAPKLLIYKNNQQPSGVPDRFSGSKSGTSASLAISGLRSEDEADYYCSTWDDSLSVRVFGGGTKLTVL

SEQ ID NO: 1644 - protein, 110 aa, synthetic construct
  REGION 1..110: note = Description of Artificial Sequence: Synthetic polypeptide
QSVLTQPPSASGTPGQRVTISCSGSSSNIGSSSVSWYQQLPGTAPKLLIYKNNQRASGVPDRFSGSKSGTSASLAISGLRSEDEADYYCSTWDDSLSVRVFGGGTKLTVL

SEQ ID NO: 1645 - protein, 110 aa, synthetic construct
  REGION 1..110: note = Description of Artificial Sequence: Synthetic polypeptide
QSVLTQPPSASGTPGQRVTISCSGSSSNIGSSSVSWYQQLPGTAPKLLIYKNNQRPYGVPDRFSGSKSGTSASLAISGLRSEDEADYYCSTWDDSLSVRVFGGGTKLTVL

SEQ ID NO: 1646 - protein, 110 aa, synthetic construct
  REGION 1..110: note = Description of Artificial Sequence: Synthetic polypeptide
QSVLTQPPSASGTPGQRVTISCSGSSSNIGSSSVSWYQQLPGTAPKLLIYKNNQRPLGVPDRFSGSKSGTSASLAISGLRSEDEADYYCSTWDDSLSVRVFGGGTKLTVL

SEQ ID NO: 1647 - protein, 110 aa, synthetic construct
  REGION 1..110: note = Description of Artificial Sequence: Synthetic polypeptide
QSVLTQPPSASGTPGQRVTISCSGSSSNIGSSSVSWYQQLPGTAPKLLIYKNNQRPSGVPDRFSGSKSGTSASLAISGLRSEDEADYYCATWDDSLSVRVFGGGTKLTVL

SEQ ID NO: 1648 - protein, 110 aa, synthetic construct
  REGION 1..110: note = Description of Artificial Sequence: Synthetic polypeptide
QSVLTQPPSASGTPGQRVTISCSGSSSNIGSSSVSWYQQLPGTAPKLLIYKNNQRPSGVPDRFSGSKSGTSASLAISGLRSEDEADYYCSSWDDSLSVRVFGGGTKLTVL

SEQ ID NO: 1649 - protein, 110 aa, synthetic construct
  REGION 1..110: note = Description of Artificial Sequence: Synthetic polypeptide
QSVLTQPPSASGTPGQRVTISCSGSSSNIGSSSVSWYQQLPGTAPKLLIYKNNQRPSGVPDRFSGSKSGTSASLAISGLRSEDEADYYCSTFDDSLSVRVFGGGTKLTVL

SEQ ID NO: 1650 - protein, 110 aa, synthetic construct
  REGION 1..110: note = Description of Artificial Sequence: Synthetic polypeptide
QSVLTQPPSASGTPGQRVTISCSGSSSNIGSSSVSWYQQLPGTAPKLLIYKNNQRPSGVPDRFSGSKSGTSASLAISGLRSEDEADYYCSTWDNSLSVRVFGGGTKLTVL

SEQ ID NO: 1651 - protein, 110 aa, synthetic construct
  REGION 1..110: note = Description of Artificial Sequence: Synthetic polypeptide
QSVLTQPPSASGTPGQRVTISCSGSSSNIGSSSVSWYQQLPGTAPKLLIYKNNQRPSGVPDRFSGSKSGTSASLAISGLRSEDEADYYCSTWDDQLSVRVFGGGTKLTVL

SEQ ID NO: 1652 - protein, 110 aa, synthetic construct
  REGION 1..110: note = Description of Artificial Sequence: Synthetic polypeptide
QSVLTQPPSASGTPGQRVTISCSGSSSNIGSSSVSWYQQLPGTAPKLLIYKNNQRPSGVPDRFSGSKSGTSASLAISGLRSEDEADYYCSTWDDALSVRVFGGGTKLTVL

SEQ ID NO: 1653 - protein, 110 aa, synthetic construct
  REGION 1..110: note = Description of Artificial Sequence: Synthetic polypeptide
QSVLTQPPSASGTPGQRVTISCSGSSSNIGSSSVSWYQQLPGTAPKLLIYKNNQRPSGVPDRFSGSKSGTSASLAISGLRSEDEADYYCSTWDDDLSVRVFGGGTKLTVL

SEQ ID NO: 1654 - protein, 110 aa, synthetic construct
  REGION 1..110: note = Description of Artificial Sequence: Synthetic polypeptide
QSVLTQPPSASGTPGQRVTISCSGSSSNIGSSSVSWYQQLPGTAPKLLIYKNNQRPSGVPDRFSGSKSGTSASLAISGLRSEDEADYYCSTWDDSNSVRVFGGGTKLTVL

SEQ ID NO: 1655 - protein, 110 aa, synthetic construct
  REGION 1..110: note = Description of Artificial Sequence: Synthetic polypeptide
QSVLTQPPSASGTPGQRVTISCSGSSSNIGSSSVSWYQQLPGTAPKLLIYKNNQRPSGVPDRFSGSKSGTSASLAISGLRSEDEADYYCSTWDDSSSVRVFGGGTKLTVL

SEQ ID NO: 1656 - protein, 110 aa, synthetic construct
  REGION 1..110: note = Description of Artificial Sequence: Synthetic polypeptide
QSVLTQPPSASGTPGQRVTISCSGSSSNIGSSSVSWYQQLPGTAPKLLIYKNNQRPSGVPDRFSGSKSGTSASLAISGLRSEDEADYYCSTWDDSLNVRVFGGGTKLTVL

SEQ ID NO: 1657 - protein, 110 aa, synthetic construct
  REGION 1..110: note = Description of Artificial Sequence: Synthetic polypeptide
QSVLTQPPSASGTPGQRVTISCSGSSSNIGSSSVSWYQQLPGTAPKLLIYKNNQRPSGVPDRFSGSKSGTSASLAISGLRSEDEADYYCSTWDDSLLVRVFGGGTKLTVL

SEQ ID NO: 1658 - protein, 110 aa, synthetic construct
  REGION 1..110: note = Description of Artificial Sequence: Synthetic polypeptide
QSVLTQPPSASGTPGQRVTISCSGSSSNIGSSSVSWYQQLPGTAPKLLIYKNNQRPSGVPDRFSGSKSGTSASLAISGLRSEDEADYYCSTWDDSLTVRVFGGGTKLTVL

SEQ ID NO: 1659 - protein, 110 aa, synthetic construct
  REGION 1..110: note = Description of Artificial Sequence: Synthetic polypeptide
QSVLTQPPSASGTPGQRVTISCSGSSSNIGSSSVSWYQQLPGTAPKLLIYKNNQRPSGVPDRFSGSKSGTSASLAISGLRSEDEADYYCSTWDDSLSIRVFGGGTKLTVL

SEQ ID NO: 1660 - protein, 110 aa, synthetic construct
  REGION 1..110: note = Description of Artificial Sequence: Synthetic polypeptide
QSVLTQPPSASGTPGQRVTISCSGSSSNIGSSSVSWYQQLPGTAPKLLIYKNNQRPSGVPDRFSGSKSGTSASLAISGLRSEDEADYYCSTWDDSLSVKVFGGGTKLTVL

SEQ ID NO: 1661 - protein, 110 aa, synthetic construct
  REGION 1..110: note = Description of Artificial Sequence: Synthetic polypeptide
QSVLTQPPSASGTPGQRVTISCSGSSSNIGSSSVSWYQQLPGTAPKLLIYKNNQRPSGVPDRFSGSKSGTSASLAISGLRSEDEADYYCSTWDDSLSVWVFGGGTKLTVL

SEQ ID NO: 1662 - protein, 110 aa, synthetic construct
  REGION 1..110: note = Description of Artificial Sequence: Synthetic polypeptide
QSVLTQPPSASGTPGQRVTISCSGSSSNIGSSSVSWYQQLPGTAPKLLIYKNNQRPSGVPDRFSGSKSGTSASLAISGLRSEDEADYYCSTWDDSLSVHVFGGGTKLTVL

SEQ ID NO: 1663 - protein, 110 aa, synthetic construct
  REGION 1..110: note = Description of Artificial Sequence: Synthetic polypeptide
QSVLTQPPSASGTPGQRVTISCSGSSSNIGSSSVSWYQQLPGTAPKLLIYKNNQRPSGVPDRFSGSKSGTSASLAISGLRSEDEADYYCSTWDDSLSVQVFGGGTKLTVL

SEQ ID NO: 1664 - protein, 110 aa, synthetic construct
  REGION 1..110: note = Description of Artificial Sequence: Synthetic polypeptide
QSVLTQPPSASGTPGQRVTISCSGSSSNIGSSSVSWYQQLPGTAPKLLIYKNNQRPSGVPDRFSGSKSGTSASLAISGLRSEDEADYYCSTWDDSLSVRIFGGGTKLTVL

SEQ ID NO: 1665 - protein, 110 aa, synthetic construct
  REGION 1..110: note = Description of Artificial Sequence: Synthetic polypeptide
QSVLTQPPSASGTPGQRVTISCSGSSSDIGSSSVSWYQQLPGTAPKLLIYKNNQRPSGVPDRFSGSKSGTSASLAISGLRSEDEADYYCSTWNDQLSVRVFGGGTKLTVL

SEQ ID NO: 1666 - protein, 110 aa, synthetic construct
  REGION 1..110: note = Description of Artificial Sequence: Synthetic polypeptide
QSVLTQPPSASGTPGQRVTISCHGSESDIGSHDVLWYQQLPGTAPKLLIYKNNQRPSGVPDRFSGSKSGTSASLAISGLRSEDEADYYCSTWDDSLSVRVFGGGTKLTVL

SEQ ID NO: 1667 - protein, 110 aa, synthetic construct; identical to SEQ ID NO: 123
  REGION 1..110: note = Description of Artificial Sequence: Synthetic polypeptide

SEQ ID NO: 1668 - protein, 110 aa, synthetic construct; identical to SEQ ID NO: 123
  REGION 1..110: note = Description of Artificial Sequence: Synthetic polypeptide

SEQ ID NO: 1669 - protein, 110 aa, synthetic construct
  REGION 1..110: note = Description of Artificial Sequence: Synthetic polypeptide
QSVLTQPPSVSGAPGQRVTISCSGSSSNIGSSSVSWYQQLPGTAPKLLIYKNNQRPSGVPDRFSGSKSGTSASLAITGLQAEDEADYYCSTWDDSLSVRVFGGGTKLTVL

SEQ ID NO: 1670 - protein, 110 aa, synthetic construct; identical to SEQ ID NO: 1669
  REGION 1..110: note = Description of Artificial Sequence: Synthetic polypeptide

SEQ ID NO: 1671 - protein, 110 aa, synthetic construct; identical to SEQ ID NO: 123
  REGION 1..110: note = Description of Artificial Sequence: Synthetic polypeptide

SEQ ID NO: 1672 - protein, 110 aa, synthetic construct; identical to SEQ ID NO: 123
  REGION 1..110: note = Description of Artificial Sequence: Synthetic polypeptide

SEQ ID NO: 1673 - protein, 110 aa, synthetic construct; identical to SEQ ID NO: 123
  REGION 1..110: note = Description of Artificial Sequence: Synthetic polypeptide

SEQ ID NO: 1674 - protein, 110 aa, synthetic construct; identical to SEQ ID NO: 123
  REGION 1..110: note = Description of Artificial Sequence: Synthetic polypeptide

SEQ ID NO: 1675 - protein, 110 aa, synthetic construct; identical to SEQ ID NO: 123
  REGION 1..110: note = Description of Artificial Sequence: Synthetic polypeptide

SEQ ID NO: 1676 - protein, 110 aa, synthetic construct; identical to SEQ ID NO: 123
  REGION 1..110: note = Description of Artificial Sequence: Synthetic polypeptide

SEQ ID NO: 1677 - protein, 110 aa, synthetic construct; identical to SEQ ID NO: 123
  REGION 1..110: note = Description of Artificial Sequence: Synthetic polypeptide

SEQ ID NO: 1678 - protein, 110 aa, synthetic construct; identical to SEQ ID NO: 123
  REGION 1..110: note = Description of Artificial Sequence: Synthetic polypeptide

SEQ ID NO: 1679 - protein, 110 aa, synthetic construct; identical to SEQ ID NO: 123
  REGION 1..110: note = Description of Artificial Sequence: Synthetic polypeptide

SEQ ID NO: 1680 - protein, 110 aa, synthetic construct; identical to SEQ ID NO: 123
  REGION 1..110: note = Description of Artificial Sequence: Synthetic polypeptide

SEQ ID NO: 1681 - protein, 110 aa, synthetic construct; identical to SEQ ID NO: 123
  REGION 1..110: note = Description of Artificial Sequence: Synthetic polypeptide

SEQ ID NO: 1682 - protein, 110 aa, synthetic construct; identical to SEQ ID NO: 123
  REGION 1..110: note = Description of Artificial Sequence: Synthetic polypeptide

SEQ ID NO: 1683 - protein, 110 aa, synthetic construct; identical to SEQ ID NO: 123
  REGION 1..110: note = Description of Artificial Sequence: Synthetic polypeptide

SEQ ID NO: 1684 - protein, 110 aa, synthetic construct; identical to SEQ ID NO: 123
  REGION 1..110: note = Description of Artificial Sequence: Synthetic polypeptide

SEQ ID NO: 1685 - protein, 110 aa, synthetic construct; identical to SEQ ID NO: 123
  REGION 1..110: note = Description of Artificial Sequence: Synthetic polypeptide

SEQ ID NO: 1686 - protein, 110 aa, synthetic construct; identical to SEQ ID NO: 123
  REGION 1..110: note = Description of Artificial Sequence: Synthetic polypeptide

SEQ ID NO: 1687 - protein, 110 aa, synthetic construct; identical to SEQ ID NO: 123
  REGION 1..110: note = Description of Artificial Sequence: Synthetic polypeptide

SEQ ID NO: 1688 - protein, 110 aa, synthetic construct; identical to SEQ ID NO: 123
  REGION 1..110: note = Description of Artificial Sequence: Synthetic polypeptide

SEQ ID NO: 1689 - protein, 110 aa, synthetic construct; identical to SEQ ID NO: 123
  REGION 1..110: note = Description of Artificial Sequence: Synthetic polypeptide

SEQ ID NO: 1690 - protein, 110 aa, synthetic construct; identical to SEQ ID NO: 123
  REGION 1..110: note = Description of Artificial Sequence: Synthetic polypeptide

SEQ ID NO: 1691 - protein, 110 aa, synthetic construct; identical to SEQ ID NO: 123
  REGION 1..110: note = Description of Artificial Sequence: Synthetic polypeptide

SEQ ID NO: 1692 - protein, 110 aa, synthetic construct; identical to SEQ ID NO: 123
  REGION 1..110: note = Description of Artificial Sequence: Synthetic polypeptide

SEQ ID NO: 1693 - protein, 110 aa, synthetic construct; identical to SEQ ID NO: 123
  REGION 1..110: note = Description of Artificial Sequence: Synthetic polypeptide

SEQ ID NO: 1694 - protein, 110 aa, synthetic construct; identical to SEQ ID NO: 123
  REGION 1..110: note = Description of Artificial Sequence: Synthetic polypeptide

SEQ ID NO: 1695 - protein, 110 aa, synthetic construct; identical to SEQ ID NO: 123
  REGION 1..110: note = Description of Artificial Sequence: Synthetic polypeptide

SEQ ID NO: 1696 - protein, 110 aa, synthetic construct; identical to SEQ ID NO: 123
  REGION 1..110: note = Description of Artificial Sequence: Synthetic polypeptide

SEQ ID NO: 1697 - protein, 110 aa, synthetic construct; identical to SEQ ID NO: 123
  REGION 1..110: note = Description of Artificial Sequence: Synthetic polypeptide

SEQ ID NO: 1698 - protein, 110 aa, synthetic construct; identical to SEQ ID NO: 123
  REGION 1..110: note = Description of Artificial Sequence: Synthetic polypeptide

SEQ ID NO: 1699 - protein, 110 aa, synthetic construct; identical to SEQ ID NO: 123
  REGION 1..110: note = Description of Artificial Sequence: Synthetic polypeptide

SEQ ID NO: 1700 - protein, 110 aa, synthetic construct; identical to SEQ ID NO: 123
  REGION 1..110: note = Description of Artificial Sequence: Synthetic polypeptide

SEQ ID NO: 1701 - protein, 110 aa, synthetic construct; identical to SEQ ID NO: 123
  REGION 1..110: note = Description of Artificial Sequence: Synthetic polypeptide

SEQ ID NO: 1702 - protein, 110 aa, synthetic construct; identical to SEQ ID NO: 123
  REGION 1..110: note = Description of Artificial Sequence: Synthetic polypeptide

SEQ ID NO: 1703 - protein, 110 aa, synthetic construct; identical to SEQ ID NO: 123
  REGION 1..110: note = Description of Artificial Sequence: Synthetic polypeptide

SEQ ID NO: 1704 - protein, 110 aa, synthetic construct
  REGION 1..110: note = Description of Artificial Sequence: Synthetic polypeptide
QSVLTQPPSASGTPGQRVTISCSGSSTNIGSSSVYWYQQLPGTAPKLLIYKNNYRPSGVPDRFSGSKSGTSASLAISGLRSEDEADYYCSTWDDSLSVRVFGGGTKLTVL

SEQ ID NO: 1705 - protein, 110 aa, synthetic construct
  REGION 1..110: note = Description of Artificial Sequence: Synthetic polypeptide
QSVLTQPPSASGTPGQRVTISCSGSSTNIGSSSVYWYQQLPGTAPKLLIYKNNYRASGVPDRFSGSKSGTSASLAISGLRSEDEADYYCSTWDDSLSVRVFGGGTKLTVL

SEQ ID NO: 1706 - protein, 110 aa, synthetic construct
  REGION 1..110: note = Description of Artificial Sequence: Synthetic polypeptide
QSVLTQPPSASGTPGQRVTISCTGSSSNIGSSYVSWYQQLPGTAPKLLIYKNSLRPQGVPDRFSGSKSGTSASLAISGLRSEDEADYYCSTWDDSLSVRVFGGGTKLTVL

SEQ ID NO: 1707 - protein, 110 aa, synthetic construct; identical to SEQ ID NO: 1706
  REGION 1..110: note = Description of Artificial Sequence: Synthetic polypeptide

SEQ ID NO: 1708 - protein, 110 aa, synthetic construct; identical to SEQ ID NO: 1706
  REGION 1..110: note = Description of Artificial Sequence: Synthetic polypeptide

SEQ ID NO: 1709 - protein, 110 aa, synthetic construct; identical to SEQ ID NO: 1706
  REGION 1..110: note = Description of Artificial Sequence: Synthetic polypeptide

SEQ ID NO: 1710 - protein, 110 aa, synthetic construct
  REGION 1..110: note = Description of Artificial Sequence: Synthetic polypeptide
QSVLTQPPSASGTPGQRVTISCSGSPSNIGSASTSWYQQLPGTAPKLLIYKNNQRPSGVPDRFSGSKSGTSASLAISGLRSEDEADYYCSTWDDSLSVRVFGGGTKLTVL

SEQ ID NO: 1711 - protein, 110 aa, synthetic construct; identical to SEQ ID NO: 1710
  REGION 1..110: note = Description of Artificial Sequence: Synthetic polypeptide

SEQ ID NO: 1712 - protein, 110 aa, synthetic construct; identical to SEQ ID NO: 1710
  REGION 1..110: note = Description of Artificial Sequence: Synthetic polypeptide

SEQ ID NO: 1713 - protein, 110 aa, synthetic construct; identical to SEQ ID NO: 1710
  REGION 1..110: note = Description of Artificial Sequence: Synthetic polypeptide

SEQ ID NO: 1714 - protein, 110 aa, synthetic construct; identical to SEQ ID NO: 1710
  REGION 1..110: note = Description of Artificial Sequence: Synthetic polypeptide

SEQ ID NO: 1715 - protein, 110 aa, synthetic construct
  REGION 1..110: note = Description of Artificial Sequence: Synthetic polypeptide
QSVLTQPPSASGTPGQRVTISCSGASSNIGHSSVYWYQQLPGTAPKLLIYRNNQQPLGVPDRFSGSKSGTSASLAISGLRSEDEADYYCSTWDDALSIRVFGGGTKLTVL

SEQ ID NO: 1716 - protein, 110 aa, synthetic construct
  REGION 1..110: note = Description of Artificial Sequence: Synthetic polypeptide
QSVLTQPPSASGTPGQRVTISCSGSSSNIGSSSVSWYQQLPGTAPKLLIYKNTQRASGVPDRFSGSKSGTSASLAISGLRSEDEADYYCSTWDDALNVRVFGGGTKLTVL

SEQ ID NO: 1717 - protein, 110 aa, synthetic construct
  REGION 1..110: note = Description of Artificial Sequence: Synthetic polypeptide
QSVLTQPPSASGTPGQRVTISCSGSSSNIGSSSVSWYQQLPGTAPKLLIYRNNQQPLGVPDRFSGSKSGTSASLAISGLRSEDEADYYCSSWDDSSLVRVFGGGTKLTVL

SEQ ID NO: 1718 - protein, 110 aa, synthetic construct
  REGION 1..110: note = Description of Artificial Sequence: Synthetic polypeptide
QSVLTQPPSASGTPGQRVTISCSGSSSNIGSSSVTWYQQLPGTAPKLLIYKNNARPSGVPDRFSGSKSGTSASLAISGLRSEDEADYYCATWDNSLSIRVFGGGTKLTVL

SEQ ID NO: 1719 - protein, 110 aa, synthetic construct
  REGION 1..110: note = Description of Artificial Sequence: Synthetic polypeptide
QSVLTQPPSASGTPGQRVTISCSGSKSNIGSSYVSWYQQLPGTAPKLLIYKDNQRASGVPDRFSGSKSGTSASLAISGLRSEDEADYYCSTWDDALSVRVFGGGTKLTVL

SEQ ID NO: 1720 - protein, 110 aa, synthetic construct; identical to SEQ ID NO: 158
  REGION 1..110: note = Description of Artificial Sequence: Synthetic polypeptide

SEQ ID NO: 1721-1724 - skipped (4 entries)

SEQ ID NO: 1725 - protein, 140 aa, synthetic construct; identical to SEQ ID NO: 99
  REGION 1..140: note = Description of Artificial Sequence: Synthetic polypeptide

SEQ ID NO: 1726 - protein, 110 aa, synthetic construct; identical to SEQ ID NO: 123
  REGION 1..110: note = Description of Artificial Sequence: Synthetic polypeptide

SEQ ID NO: 1727 - protein, 31 aa, synthetic construct; identical to SEQ ID NO: 38
  REGION 1..31: note = Description of Artificial Sequence: Synthetic polypeptide

SEQ ID NO: 1728 - protein, 37 aa, synthetic construct
  REGION 1..37: note = Description of Artificial Sequence: Synthetic polypeptide
  VARIANT 1..4: note = MOD_RES - Any amino acid
  VARIANT 7..13: note = MOD_RES - Any amino acid
  VARIANT 7..13: note = SITE - This region may encompass 4-7 residues
  VARIANT 15..22: note = MOD_RES - Any amino acid
  VARIANT 15..22: note = SITE - This region may encompass 6-8 residues
  VARIANT 24..37: note = MOD_RES - Any amino acid
  VARIANT 24..37: note = SITE - This region may encompass 10-14 residues
XXXXCCXXXXXXXCXXXXXXXXCXXXXXXXXXXXXXX

SEQ ID NO: 1729 - protein, 31 aa, synthetic construct
  REGION 1..31: note = Description of Artificial Sequence: Synthetic polypeptide
  VARIANT 1: note = MOD_RES - I or T
  VARIANT 2: note = MOD_RES - S or T
  VARIANT 3: note = MOD_RES - A, P, or S
  VARIANT 4: note = MOD_RES - F or Y
  VARIANT 7: note = MOD_RES - H, L, Q, or R
  VARIANT 8: note = MOD_RES - G or S
  VARIANT 9: note = MOD_RES - A, G, K, or N
  VARIANT 10: note = MOD_RES - A, N, Q, R, or S
  VARIANT 12: note = MOD_RES - A, L, or P
  VARIANT 13: note = MOD_RES - N or S
  VARIANT 14: note = MOD_RES - H, Q, R, or S
  VARIANT 15: note = MOD_RES - D or E
  VARIANT 18: note = MOD_RES - F or Y
  VARIANT 20: note = MOD_RES - A, G, or N
  VARIANT 21: note = MOD_RES - G or N
  VARIANT 22: note = MOD_RES - Q, S, or Y
  VARIANT 23: note = MOD_RES - D, F, N, or Y
  VARIANT 24: note = MOD_RES - A, K, N, P, or Q
  VARIANT 25: note = MOD_RES - D, Q, R, or S
  VARIANT 26: note = MOD_RES - F or Y
  VARIANT 28: note = MOD_RES - F, L, W, or Y
  VARIANT 29: note = MOD_RES - F, M, or V
  VARIANT 30: note = MOD_RES - D or N
  VARIANT 31: note = MOD_RES - I, P, or V
XXXXCCXXXXCXXXXTSXCXXXXXXXYXXXX

SEQ ID NO: 1730 - protein, 32 aa, synthetic construct
  REGION 1..32: note = Description of Artificial Sequence: Synthetic polypeptide
TSSFCCRGGGSCPSHDTSYCGGQYKSYYYMDV

SEQ ID NO: 1731 - protein, 31 aa, synthetic construct
  REGION 1..31: note = Description of Artificial Sequence: Synthetic polypeptide
  VARIANT 1..4: note = MOD_RES - Any amino acid
  VARIANT 7..10: note = MOD_RES - Any amino acid
  VARIANT 12..18: note = MOD_RES - Any amino acid
  VARIANT 20..31: note = MOD_RES - Any amino acid
XXXXCCXXXXCXXXXXXXCXXXXXXXXXXXX

SEQ ID NO: 1732 - protein, 27 aa, synthetic construct
  REGION 1..27: note = Description of Artificial Sequence: Synthetic peptide
  VARIANT 1..4: note = MOD_RES - Any amino acid
  VARIANT 8..14: note = MOD_RES - Any amino acid
  VARIANT 16..27: note = MOD_RES - Any amino acid
XXXXCGGXXXXXXXCXXXXXXXXXXXX

SEQ ID NO: 1733 - skipped

SEQ ID NO: 1734 - protein, 27 aa, synthetic construct
  REGION 1..27: note = Description of Artificial Sequence: Synthetic peptide
TSSFCGGPSHDTSYCGGQYKSYYYMDV

SEQ ID NO: 1735 - protein, 32 aa, synthetic construct
  REGION 1..32: note = Description of Artificial Sequence: Synthetic polypeptide
TSSFCCRSGGSCPSHDTSYCGGQYKSYYYMDV

SEQ ID NO: 1736 - skipped

SEQ ID NO: 1737 - protein, 33 aa, synthetic construct
  REGION 1..33: note = Description of Artificial Sequence: Synthetic polypeptide
TSSFCCRGGGGSCPSHDTSYCGGQYKSYYYMDV

SEQ ID NO: 1738 - protein, 34 aa, synthetic construct
  REGION 1..34: note = Description of Artificial Sequence: Synthetic polypeptide
TSSFCCRGGSGGSCPSHDTSYCGGQYKSYYYMDV

SEQ ID NO: 1739 - protein, 30 aa, synthetic construct
  REGION 1..30: note = Description of Artificial Sequence: Synthetic polypeptide
TSSFSCRGGSCPSHDTSYGGQYKSYYYMDV

SEQ ID NO: 1740 - protein, 32 aa, synthetic construct
  REGION 1..32: note = Description of Artificial Sequence: Synthetic polypeptide
TSSFCCRGGSCPSHDTSYCGGGQYKSYYYMDV

SEQ ID NO: 1741 - protein, 33 aa, synthetic construct
  REGION 1..33: note = Description of Artificial Sequence: Synthetic polypeptide
TSSFCCRGGSCPSHDTSYCGGGSGYKSYYYMDV

SEQ ID NO: 1742 - protein, 30 aa, synthetic construct
  REGION 1..30: note = Description of Artificial Sequence: Synthetic polypeptide
TSSFCCRGGSCPSHDTSYCGGQKSYYYMDV

SEQ ID NO: 1743 - protein, 30 aa, synthetic construct
  REGION 1..30: note = Description of Artificial Sequence: Synthetic polypeptide
TSSFCCRGGSCPSHDTSYCGGQYSYYYMDV

SEQ ID NO: 1744 - protein, 30 aa, synthetic construct
  REGION 1..30: note = Description of Artificial Sequence: Synthetic polypeptide
TSSFCCRGGSCPSHDTSYCGQYKSYYYMDV

SEQ ID NO: 1745 - protein, 32 aa, synthetic construct
  REGION 1..32: note = Description of Artificial Sequence: Synthetic polypeptide
TSSFCCRGGSCPSHDTSYCGGQYKSSYYYMDV

SEQ ID NO: 1746 - protein, 139 aa, synthetic construct
  REGION 1..139: note = Description of Artificial Sequence: Synthetic polypeptide
EVQLVESGGALVKPGGSLRLSCAASGFTFSKAWMSWVRQAPGKGLEWVGRIKSVTDGETTDYAAPVKGRFTISRDDSKSTLYLQMNSLKTEDTAVYYCTSSFCCRGGSCPSHDTSYCGQYKSYYYMDVWGKGTTVTVSS

SEQ ID NO: 1747 - protein, 136 aa, synthetic construct
  REGION 1..136: note = Description of Artificial Sequence: Synthetic polypeptide
EVQLVESGGALVKPGGSLRLSCAASGFTFSKAWMSWVRQAPGKGLEWVGRIKSVTDGETTDYAAPVKGRFTISRDDSKSTLYLQMNSLKTEDTAVYYCTSSFCGGPSHDTSYCGGQYKSYYYMDVWGKGTTVTVSS

SEQ ID NO: 1748 - protein, 141 aa, synthetic construct
  REGION 1..141: note = Description of Artificial Sequence: Synthetic polypeptide
EVQLVESGGALVKPGGSLRLSCAASGFTFSKAWMSWVRQAPGKGLEWVGRIKSVTDGETTDYAAPVKGRFTISRDDSKSTLYLQMNSLKTEDTAVYYCTSSFCCRSGGSCPSHDTSYCGGQYKSYYYMDVWGKGTTVTVSS

SEQ ID NO: 1749 - protein, 141 aa, synthetic construct
  REGION 1..141: note = Description of Artificial Sequence: Synthetic polypeptide
EVQLVESGGALVKPGGSLRLSCAASGFTFSKAWMSWVRQAPGKGLEWVGRIKSVTDGETTDYAAPVKGRFTISRDDSKSTLYLQMNSLKTEDTAVYYCTSSFCCRGGGSCPSHDTSYCGGQYKSYYYMDVWGKGTTVTVSS

SEQ ID NO: 1750 - protein, 142 aa, synthetic construct
  REGION 1..142: note = Description of Artificial Sequence: Synthetic polypeptide
EVQLVESGGALVKPGGSLRLSCAASGFTFSKAWMSWVRQAPGKGLEWVGRIKSVTDGETTDYAAPVKGRFTISRDDSKSTLYLQMNSLKTEDTAVYYCTSSFCCRGGGGSCPSHDTSYCGGQYKSYYYMDVWGKGTTVTVSS

SEQ ID NO: 1751 - protein, 143 aa, synthetic construct
  REGION 1..143: note = Description of Artificial Sequence: Synthetic polypeptide
EVQLVESGGALVKPGGSLRLSCAASGFTFSKAWMSWVRQAPGKGLEWVGRIKSVTDGETTDYAAPVKGRFTISRDDSKSTLYLQMNSLKTEDTAVYYCTSSFCCRGGSGGSCPSHDTSYCGGQYKSYYYMDVWGKGTTVTVSS

SEQ ID NO: 1752 - protein, 139 aa, synthetic construct
  REGION 1..139: note = Description of Artificial Sequence: Synthetic polypeptide
EVQLVESGGALVKPGGSLRLSCAASGFTFSKAWMSWVRQAPGKGLEWVGRIKSVTDGETTDYAAPVKGRFTISRDDSKSTLYLQMNSLKTEDTAVYYCTSSFSCRGGSCPSHDTSYGGQYKSYYYMDVWGKGTTVTVSS

SEQ ID NO: 1753 - protein, 141 aa, synthetic construct
  REGION 1..141: note = Description of Artificial Sequence: Synthetic polypeptide
EVQLVESGGALVKPGGSLRLSCAASGFTFSKAWMSWVRQAPGKGLEWVGRIKSVTDGETTDYAAPVKGRFTISRDDSKSTLYLQMNSLKTEDTAVYYCTSSFCCRGGSCPSHDTSYCGGGQYKSYYYMDVWGKGTTVTVSS

SEQ ID NO: 1754 - protein, 142 aa, synthetic construct
  REGION 1..142: note = Description of Artificial Sequence: Synthetic polypeptide
EVQLVESGGALVKPGGSLRLSCAASGFTFSKAWMSWVRQAPGKGLEWVGRIKSVTDGETTDYAAPVKGRFTISRDDSKSTLYLQMNSLKTEDTAVYYCTSSFCCRGGSCPSHDTSYCGGGSGYKSYYYMDVWGKGTTVTVSS

SEQ ID NO: 1755 - protein, 139 aa, synthetic construct
  REGION 1..139: note = Description of Artificial Sequence: Synthetic polypeptide
EVQLVESGGALVKPGGSLRLSCAASGFTFSKAWMSWVRQAPGKGLEWVGRIKSVTDGETTDYAAPVKGRFTISRDDSKSTLYLQMNSLKTEDTAVYYCTSSFCCRGGSCPSHDTSYCGGQKSYYYMDVWGKGTTVTVSS

SEQ ID NO: 1756 - protein, 139 aa, synthetic construct
  REGION 1..139: note = Description of Artificial Sequence: Synthetic polypeptide
EVQLVESGGALVKPGGSLRLSCAASGFTFSKAWMSWVRQAPGKGLEWVGRIKSVTDGETTDYAAPVKGRFTISRDDSKSTLYLQMNSLKTEDTAVYYCTSSFCCRGGSCPSHDTSYCGGQYSYYYMDVWGKGTTVTVSS

SEQ ID NO: 1757 - protein, 141 aa, synthetic construct
  REGION 1..141: note = Description of Artificial Sequence: Synthetic polypeptide
EVQLVESGGALVKPGGSLRLSCAASGFTFSKAWMSWVRQAPGKGLEWVGRIKSVTDGETTDYAAPVKGRFTISRDDSKSTLYLQMNSLKTEDTAVYYCTSSFCCRGGSCPSHDTSYCGGQYKSSYYYMDVWGKGTTVTVSS

SEQ ID NO: 1758 - protein, 140 aa, synthetic construct
  REGION 1..140: note = Description of Artificial Sequence: Synthetic polypeptide
EVQLVESGGGLVKPGGSLRLSCAGSGFTFNKAWMSWVRQAPGKGLEWVGRIKSTSDGGITDYAAPVKGRFTISRDDSKDTLYLQMNSLKTEDAAVYYCTTSFCCRGGRCPSRDTSFCGGQYNSYYYMDVWGRGTTVTVSS

SEQ ID NO: 1759 - protein, 111 aa, synthetic construct
  REGION 1..111: note = Description of Artificial Sequence: Synthetic polypeptide
QQSVLTQPPSASGTPGQTVTISCSGSSSHIESNYVEWYQQLPETAPKLLIHRNDQRPSGVPDRFSGSKSGTSASLAISGLRSEDDADYYCAAWDDSLSVWVFGGGTKLTVL

SEQ ID NO: 1760 - protein, 110 aa, synthetic construct
  REGION 1..110: note = Description of Artificial Sequence: Synthetic polypeptide
QSVLTQPPSASGTPGQRVTISCSGSSSNIGSSSVSWYQQLPGTAPKLLIYKNNQRPSGVPDRFSGSKSGTSASLAISGLRSEDEADYYCATIDESMKIKVFGGGTKLTVL

SEQ ID NO: 1761 - protein, 10 aa, synthetic construct
  REGION 1..10: note = Description of Artificial Sequence: Synthetic peptide
GFTFNKAWMS

SEQ ID NO: 1762 - protein, 13 aa, synthetic construct
  REGION 1..13: note = Description of Artificial Sequence: Synthetic peptide
SGSSSHIESNYVE

SEQ ID NO: 1763 - protein, 7 aa, synthetic construct
  REGION 1..7: note = Description of Artificial Sequence: Synthetic peptide
RNDQRPS

SEQ ID NO: 1764 - protein, 11 aa, synthetic construct
  REGION 1..11: note = Description of Artificial Sequence: Synthetic peptide
AAWDDSLSVWV

SEQ ID NO: 1765 - protein, 11 aa, synthetic construct
  REGION 1..11: note = Description of Artificial Sequence: Synthetic peptide
ATIDESMKIKV

SEQ ID NO: 1766 - protein, 6 aa, synthetic construct
  REGION 1..6: note = Description of Artificial Sequence: Synthetic peptide
  VARIANT 3: note = MOD_RES - H, R, or S
PSXDTS
